(19) United States
(12) Patent Application Publication
(10) Pub. No.: US 2023/0174628 A1
(43) Pub. Date: Jun. 8, 2023

(54) ANTI-NOVEL CORONAVIRUS MONOCLONAL ANTIBODY AND APPLICATION THEREOF

(71) Applicant: PEKING UNIVERSITY, Beijing (CN)

(72) Inventors: Xiaoliang Sunney XIE, Beijing (CN); Yunlong CAO, Beijing (CN); Wenjie SUN, Beijing (CN); Xu ZHANG, Beijing (CN)

(21) Appl. No.: 17/921,965

(22) PCT Filed: Apr. 27, 2021
(86) PCT No.: PCT/CN2021/090146

§ 371 Date: Oct. 27, 2022

(30) Foreign Application Priority Data
Apr. 28, 2020 (CN) 202010352448.5

(51) Int. Cl. C07K 16/10; G01N 33/569; A61P 31/14

(52) U.S. Cl. CPC C07K 16/10; G01N 33/56983; A61P 31/14; C07K 2317/92; C07K 2317/76; G01N 2333/165; G01N 2469/10; A61K 2039/505

(57) ABSTRACT

The present invention relates to the fields of immunology and molecular virology, and in particular, to the field of diagnosis, prevention and treatment of a novel coronavirus. Specifically, the present invention relates to an anti-novel coronavirus monoclonal antibody and a composition (for example, a diagnostic agent and a therapeutic agent) containing same. In addition, the present invention also relates to use of the antibody. The antibody of the present invention can be used for diagnosing, preventing and/or treating novel coronavirus infections and/or diseases (for example, novel coronavirus pneumonia) caused by the infections.

### TECHNICAL FIELD

[0001] The present invention relates to the fields of immunology and molecular virology, and in particular, to the field of diagnosis, prevention and treatment of a novel coronavirus. Specifically, the present invention relates to an anti-novel coronavirus antibody and a composition (for example, a diagnostic agent and a therapeutic agent) containing same. In addition, the present invention also relates to use of the antibody. The antibody of the present invention can be used for diagnosing, preventing and/or treating novel coronavirus infections and/or diseases (for example, novel coronavirus pneumonia) caused by the infections.

### BACKGROUND ART

[0002] As a single-stranded RNA virus, the novel coronavirus (severe acute respiratory syndrome coronavirus 2, SARS-CoV-2) is the pathogen of novel coronavirus pneumonia (coronavirus disease 2019, COVID-19), and is a member of the Coronaviridae family, alongside the severe acute respiratory syndrome coronavirus (SARS-CoV) epidemic in 2002-2003 and the Middle East respiratory syndrome coronavirus (MERS-CoV) epidemic in 2012. Coronavirus is a relatively large virus with round, oval or pleomorphic particles having a diameter of 50-200 nm. Coronavirus is an enveloped virus. The capsid of the virus is enveloped with a lipid envelope, on which a wide spike protein (Spike, S protein, SEQ ID No: 1460) is arranged forming a sun halo shape. Studies have confirmed that the S protein is located on the surface of the novel coronavirus SARS-CoV-2, and can bind to a receptor, angiotensin converting enzyme 2 (ACE2) molecule of a host cell via a receptor binding domain (RBD) contained therein during the virus infection of the host, thereby initiating the fusion of the viral membrane with the host cell membrane and causing the virus to infect the host cell.

[0003] So far, a neutralizing antibody has been proved to be an effective method for treating viral diseases. In general, upon stimulated by an antigen, a B lymphocyte in a patient is activated and then transformed and differentiated into a variety of different cells, and antibodies are produced. According to existing researches and reports, there is an anti-novel coronavirus antibody in the peripheral blood of patients recovered from novel coronavirus pneumonia, which is produced and secreted by activated B cells. However, there are a variety of B cells in the plasma of the recovered patients, and the binding activities and neutralizing titers of antibodies produced by different B cells are also different. So far, there is no study reporting an anti-novel coronavirus antibody with a high binding activity and/or a high neutralizing activity.

[0004] Therefore, there is a need to develop an antibody with a high binding activity and/or a high neutralizing activity against novel coronavirus SARS-CoV-2, thereby providing effective means for diagnosing, preventing and/or treating novel coronavirus infections.

### SUMMARY OF THE INVENTION

[0005] The following technical solutions provided herein meet the above-mentioned needs and provide relevant advantages.

[0006] In one aspect, provided herein is an antigen-binding unit comprising a heavy chain variable region (VH) and a light chain variable region (VL), wherein the heavy chain variable region comprises VH CDR1, VH CDR2 and VH CDR3, and the light chain variable region comprises VL CDR1, VL CDR2 and VL CDR3, wherein the VH CDR3 comprises a sequence selected from SEQ ID NOs: 1-360 and 2971-3005 or a sequence comprising one or more amino acid additions, deletions, or substitutions compared with SEQ ID NOs: 1-360 and 2971-3005, and/or wherein the VL CDR3 comprises a sequence selected from SEQ ID NOs: 361-720 and 3076-3110 or a sequence comprising one or more amino acid additions, deletions, or substitutions compared with SEQ ID NOs: 361-720 and 3076-3110.

[0007] In some embodiments, the antigen-binding unit binds to a receptor binding domain (RBD) of an S protein of a novel coronavirus (SARS-CoV-2) with an equilibrium dissociation constant (KD) of less than 100 nM, less than 50 nM, less than 20 nM, less than 15 nM, less than 10 nM, less than 5 nM, less than 4 nM, less than 3 nM, less than 2 nM, less than 1 nM, less than 0.5 nM, less than 0.1 nM, less than 0.05 nM, or less than 0.01 nM.

[0008] In some embodiments, the antigen-binding unit neutralizes the novel coronavirus (SARS-CoV-2) with an IC₅₀ of less than 20 μg/ml, less than 10 μg/ml, less than 9 μg/ml, less than 8 μg/ml, less than 7 μg/ml, less than 6 μg/ml, less than 5 μg/ml, less than 4 μg/ml, less than 3 μg/ml, less than 2 μg/ml, less than 1 μg/ml, less than 0.5 μg/ml, less than 0.25 μg/ml, less than 0.2 μg/ml, less than 0.1 μg/ml, less than 0.05 μg/ml, or less than 0.001 μg/ml.

[0009] In some embodiments, the VH CDR1 of the antigen-binding unit comprises a sequence selected from SEQ ID NOs: 1461-1820 and 2901-2935 or a sequence comprising one or more amino acid additions, deletions, or substitutions compared with SEQ ID NOs: 1461-1820 and 2901-2935. In some embodiments, the VH CDR1 of the antigen-binding unit comprises a sequence selected from SEQ ID NOs: 1461-1820 and 2901-2935. In some embodiments, the VH CDR1 of the antigen-binding unit comprises a sequence comprising 5, 4, 3, 2 or 1 amino acid additions, deletions, or substitutions compared with SEQ ID NOs: 1461-1820 and 2901-2935. In some embodiments, the VH CDR1 of the antigen-binding unit comprises the same sequence as CDR1 contained in SEQ ID NOs: 721-1080 and 3111-3145.

[0010] In some embodiments, the VH CDR2 of the antigen-binding unit comprises a sequence selected from SEQ ID NOs: 1821-2180 and 2936-2970 or a sequence comprising one or more amino acid additions, deletions, or substitutions compared with SEQ ID NOs: 1821-2180 and 2936-2970. In some embodiments, the VH CDR2 of the antigen-binding unit comprises a sequence selected from SEQ ID NOs: 1821-2180 and 2936-2970. In some embodiments, the VH CDR2 of the antigen-binding unit comprises a sequence comprising 5, 4, 3, 2 or 1 amino acid additions, deletions, or substitutions compared with SEQ ID NOs: 1821-2180 and 2936-2970. In some embodiments, the VH CDR2 of the antigen-binding unit comprises the same sequence as CDR2 contained in SEQ ID NOs: 721-1080 and 3111-3145.

[0011] In some embodiments, the VL CDR1 of the antigen-binding unit comprises a sequence selected from SEQ ID NOs: 2181-2540 and 3006-3040 or a sequence comprising one or more amino acid additions, deletions, or substitutions compared with SEQ ID NOs: 2181-2540 and 3006-3040. In some embodiments, the VL CDR1 of the antigen-binding unit comprises a sequence selected from SEQ ID NOs: 2181-2540 and 3006-3040. In some embodiments, the VL CDR1 of the antigen-binding unit comprises a sequence comprising 5, 4, 3, 2 or 1 amino acid additions, deletions, or substitutions compared with SEQ ID NOs: 2181-2540 and 3006-3040. In some embodiments, the VL CDR1 of the antigen-binding unit comprises the same sequence as CDR1 contained in SEQ ID NOs: 1081-1440 and 3146-3180.

[0012] In some embodiments, the VL CDR2 of the antigen-binding unit comprises a sequence selected from SEQ ID NOs: 2541-2900 and 3041-3075 or a sequence comprising one or more amino acid additions, deletions, or substitutions compared with SEQ ID NOs: 2541-2900 and 3041-3075. In some embodiments, the VL CDR2 of the antigen-binding unit comprises a sequence selected from SEQ ID NOs: 2541-2900 and 3041-3075. In some embodiments, the VL CDR2 of the antigen-binding unit comprises a sequence comprising 5, 4, 3, 2 or 1 amino acid additions, deletions, or substitutions compared with SEQ ID NOs: 2541-2900 and 3041-3075. In some embodiments, the VL CDR2 of the antigen-binding unit comprises the same sequence as CDR2 contained in SEQ ID NOs: 1081-1440 and 3146-3180.

[0013] In some embodiments, the VH of the antigen-binding unit comprises a sequence selected from SEQ ID NOs: 721-1080 and 3111-3145 or a sequence comprising one or more amino acid additions, deletions, or substitutions compared with SEQ ID NOs: 721-1080 and 3111-3145. In some embodiments, the VH of the antigen-binding unit comprises a sequence selected from SEQ ID NOs: 721-1080 and 3111-3145. In some embodiments, the VH of the antigen-binding unit comprises a sequence comprising 10, 9, 8, 7, 6, 5, 4, 3, 2 or 1 amino acid additions, deletions, or substitutions compared with SEQ ID NOs: 721-1080 and 3111-3145. In some embodiments, the VH of the antigen-binding unit comprises a sequence having at least 80%, 85%, 90%, 91%, 92%, 93%, 94%, 95%, 96%, 97%, 98%, 99% or 99% identity to a sequence selected from SEQ ID NOs: 721-1080 and 3111-3145.

[0014] In some embodiments, the VL of the antigen-binding unit comprises a sequence selected from SEQ ID NOs: 1081-1440 and 3146-3180 or a sequence comprising one or more amino acid additions, deletions, or substitutions compared with SEQ ID NOs: 1081-1440 and 3146-3180. In some embodiments, the VL of the antigen-binding unit comprises a sequence selected from SEQ ID NOs: 1081-1440 and 3146-3180. In some embodiments, the VL of the antigen-binding unit comprises a sequence comprising 10, 9, 8, 7, 6, 5, 4, 3, 2 or 1 amino acid additions, deletions, or substitutions compared with SEQ ID NOs: 1081-1440 and 3146-3180. In some embodiments, the VL of the antigen-binding unit comprises a sequence having at least 80%, 85%, 90%, 91%, 92%, 93%, 94%, 95%, 96%, 97%, 98%, 99% or 99% identity to a sequence selected from SEQ ID NOs: 1081-1440 and 3146-3180.

[0015] In another aspect, provided herein is an antigen-binding unit comprising a heavy chain variable region (VH) and a light chain variable region (VL), wherein the heavy chain variable region comprises VH CDR1, VH CDR2 and VH CDR3, and the light chain variable region comprises VL CDR1, VL CDR2 and VL CDR3, wherein the VH CDR1 comprises a sequence selected from SEQ ID NOs: 1461-1820 and 2901-2935, a sequence comprising one or more amino acid additions, deletions, or substitutions compared with SEQ ID NOs: 1461-1820 and 2901-2935, or the same sequence as CDR1 contained in SEQ ID NOs: 721-1080 and 3111-3145, wherein the VH CDR2 comprises a sequence selected from SEQ ID NOs: 1821-2180 and 2936-2970, a sequence comprising one or more amino acid additions, deletions, or substitutions compared with SEQ ID NOs: 1821-2180 and 2936-2970, or the same sequence as CDR2 contained in SEQ ID NOs: 721-1080 and 3111-3145, and wherein the VH CDR3 comprises a sequence selected from SEQ ID NOs: 1-360 and 2971-3005, a sequence comprising one or more amino acid additions, deletions, or substitutions compared with SEQ ID NOs: 1-360 and 2971-3005, or the same sequence as CDR3 contained in SEQ ID NOs: 721-1080 and 3111-3145, and/or wherein the VL CDR1 comprises a sequence selected from SEQ ID NOs: 2181-2540 and 3006-3040, a sequence comprising one or more amino acid additions, deletions, or substitutions compared with SEQ ID NOs: 2181-2540 and 3006-3040, or the same sequence as CDR1 contained in SEQ ID NOs: 1081-1440 and 3146-3180, the VL CDR2 comprises a sequence selected from SEQ ID NOs: 2541-2900 and 3041-3075, a sequence comprising one or more amino acid additions, deletions, or substitutions compared with SEQ ID NOs: 2541-2900 and 3041-3075, or the same sequence as CDR2 contained in SEQ ID NOs: 1081-1440 and 3146-3180, and the VL CDR3 comprises a sequence selected from SEQ ID NOs: 361-720 and 3076-3110, a sequence comprising one or more amino acid additions, deletions, or substitutions compared with SEQ ID NOs: 361-720 and 3076-3110, or the same sequence as CDR3 contained in SEQ ID NOs: 1081-1440 and 3146-3180.

[0016] In another aspect, provided herein is an antigen-binding unit comprising a heavy chain variable region (VH) and a light chain variable region (VL), wherein the heavy chain variable region comprises VH CDR1, VH CDR2 and VH CDR3, and the light chain variable region comprises VL CDR1, VL CDR2 and VL CDR3, wherein the VH CDR1 comprises a sequence selected from SEQ ID NOs: 1461-1820 and 2901-2935 or a sequence comprising one or more amino acid additions, deletions, or substitutions compared with SEQ ID NOs: 1461-1820 and 2901-2935, wherein the VH CDR2 comprises a sequence selected from SEQ ID NOs: 1821-2180 and 2936-2970 or a sequence comprising one or more amino acid additions, deletions, or substitutions compared with SEQ ID NOs: 1821-2180 and 2936-2970, and wherein the VH CDR3 comprises a sequence selected from SEQ ID NOs: 1-360 and 2971-3005 or a sequence comprising one or more amino acid additions, deletions, or substitutions compared with SEQ ID NOs: 1-360 and 2971-3005, and/or wherein the VL CDR1 comprises a sequence selected from SEQ ID NOs: 2181-2540 and 3006-3040 or a sequence comprising one or more amino acid additions, deletions, or substitutions compared with SEQ ID NOs: 2181-2540 and 3006-3040, the VL CDR2 comprises a sequence selected from SEQ ID NOs: 2541-2900 and 3041-3075 or a sequence comprising one or more amino acid additions, deletions, or substitutions compared with SEQ ID NOs: 2541-2900 and 3041-3075, and the VL CDR3 comprises a sequence selected from SEQ ID NOs: 361-720 and 3076-3110 or a sequence comprising one or more amino acid additions, deletions, or substitutions compared with SEQ ID NOs: 361-720 and 3076-3110.

[0017] In some embodiments, the VH of the antigen-binding unit comprises a sequence selected from SEQ ID NOs: 721-1080 and 3111-3145 or a sequence comprising one or more amino acid additions, deletions, or substitutions compared with SEQ ID NOs: 721-1080 and 3111-3145. In some embodiments, the VH of the antigen-binding unit comprises a sequence selected from SEQ ID NOs: 721-1080 and 3111-3145. In some embodiments, the VH of the antigen-binding unit comprises a sequence comprising 10, 9, 8, 7, 6, 5, 4, 3, 2 or 1 amino acid additions, deletions, or substitutions compared with SEQ ID NOs: 721-1080 and 3111-3145. In some embodiments, the VH of the antigen-binding unit comprises a sequence having at least 80%, 85%, 90%, 91%, 92%, 93%, 94%, 95%, 96%, 97%, 98%, 99% or 99% identity to a sequence selected from SEQ ID NOs: 721-1080 and 3111-3145.

[0018] In some embodiments, the VL of the antigen-binding unit comprises a sequence selected from SEQ ID NOs: 1081-1440 and 3146-3180 or a sequence comprising one or more amino acid additions, deletions, or substitutions compared with SEQ ID NOs: 1081-1440 and 3146-3180. In some embodiments, the VL of the antigen-binding unit comprises a sequence selected from SEQ ID NOs: 1081-1440 and 3146-3180. In some embodiments, the VL of the antigen-binding unit comprises a sequence comprising 10, 9, 8, 7, 6, 5, 4, 3, 2 or 1 amino acid additions, deletions, or substitutions compared with SEQ ID NOs: 1081-1440 and 3146-3180. In some embodiments, the VL of the antigen-binding unit comprises a sequence having at least 80%, 85%, 90%, 91%, 92%, 93%, 94%, 95%, 96%, 97%, 98%, 99% or 99% identity to a sequence selected from SEQ ID NOs: 1081-1440 and 3146-3180.

[0019] In some embodiments, the antigen-binding unit binds to a receptor binding domain (RBD) of an S protein of a novel coronavirus (SARS-CoV-2) with an equilibrium dissociation constant (KD) of less than 100 nM, less than 50 nM, less than 20 nM, less than 15 nM, less than 10 nM, less than 5 nM, less than 4 nM, less than 3 nM, less than 2 nM, less than 1 nM, less than 0.5 nM, less than 0.1 nM, less than 0.05 nM, or less than 0.01 nM.

[0020] In some embodiments, the antigen-binding unit neutralizes the novel coronavirus (SARS-CoV-2) with an IC50 of less than 20 μg/ml, less than 10 μg/ml, less than 9 μg/ml, less than 8 μg/ml, less than 7 μg/ml, less than 6 μg/ml, less than 5 μg/ml, less than 4 μg/ml, less than 3 μg/ml, less than 2 μg/ml, less than 1 μg/ml, less than 0.5 μg/ml, less than 0.25 μg/ml, less than 0.2 μg/ml, less than 0.1 μg/ml, less than 0.05 μg/ml, or less than 0.001 μg/ml.

[0021] In another aspect, provided herein is an antigen-binding unit comprising a heavy chain variable region (VH) and a light chain variable region (VL), wherein the VH comprises a sequence having at least 80%, 85%, 90%, 91%, 92%, 93%, 94%, 95%, 96%, 97%, 98%, 99% or 99% identity to a sequence selected from SEQ ID NOs: 721-1080 and 3111-3145, and/or wherein the VL comprises a sequence having at least 80%, 85%, 90%, 91%, 92%, 93%, 94%, 95%, 96%, 97%, 98%, 99% or 99% identity to a sequence selected from SEQ ID NOs: 1081-1440 and 3146-3180.

[0022] In some embodiments, the antigen-binding unit binds to a receptor binding domain (RBD) of an S protein of a novel coronavirus (SARS-CoV-2) with an equilibrium dissociation constant (KD) of less than 100 nM, less than 50 nM, less than 20 nM, less than 15 nM, less than 10 nM, less than 5 nM, less than 4 nM, less than 3 nM, less than 2 nM, less than 1 nM, less than 0.5 nM, less than 0.1 nM, less than 0.05 nM, or less than 0.01 nM.

[0023] In some embodiments, the antigen-binding unit neutralizes the novel coronavirus (SARS-CoV-2) with an IC50 of less than 20 μg/ml, less than 10 μg/ml, less than 9 μg/ml, less than 8 μg/ml, less than 7 μg/ml, less than 6 μg/ml, less than 5 μg/ml, less than 4 μg/ml, less than 3 μg/ml, less than 2 μg/ml, less than 1 μg/ml, less than 0.5 μg/ml, less than 0.25 μg/ml, less than 0.2 μg/ml, less than 0.1 μg/ml, less than 0.05 μg/ml, or less than 0.001 μg/ml.

[0024] In some embodiments, the antigen-binding unit further comprises a heavy chain constant region (CH). In some embodiments, the CH of the antigen-binding unit comprises a sequence of SEQ ID NO: 1457 or a sequence comprising one or more amino acid additions, deletions, or substitutions compared with SEQ ID NO: 1457. In some embodiments, the CH of the antigen-binding unit comprises a sequence selected from SEQ ID NO: 1457. In some embodiments, the CH of the antigen-binding unit comprises a sequence comprising 10, 9, 8, 7, 6, 5, 4, 3, 2 or 1 amino acid additions, deletions, or substitutions compared with SEQ ID NO: 1457. In some embodiments, the CH of the antigen-binding unit comprises a sequence having at least 80%, 85%, 90%, 91%, 92%, 93%, 94%, 95%, 96%, 97%, 98%, 99% or 99% identity to a sequence selected from SEQ ID NO: 1457.

[0025] In some embodiments, the antigen-binding unit further comprises a light chain constant region (CL). In some embodiments, the CL of the antigen-binding unit comprises a sequence of SEQ ID NO: 1458 or a sequence comprising one or more amino acid additions, deletions, or substitutions compared with SEQ ID NO: 1458. In some embodiments, the CL of the antigen-binding unit comprises a sequence selected from SEQ ID NO: 1458. In some embodiments, the CL of the antigen-binding unit comprises a sequence comprising 10, 9, 8, 7, 6, 5, 4, 3, 2 or 1 amino acid additions, deletions, or substitutions compared with SEQ ID NO: 1458. In some embodiments, the CL of the antigen-binding unit comprises a sequence having at least 80%, 85%, 90%, 91%, 92%, 93%, 94%, 95%, 96%, 97%, 98%, 99% or 99% identity to a sequence selected from SEQ ID NO: 1458.

[0026] In another aspect, provided herein is an isolated nucleic acid molecule encoding the antigen-binding unit of the present invention as defined above.

[0027] In another aspect, provided herein is a vector, comprising the isolated nucleic acid molecule as defined above. The vector of the present invention can be a cloning vector and can also be an expression vector. In some embodiments, the vector of the present invention is for example, a plasmid, a cosmid, a phage or the like.

[0028] In another aspect, further provided is a host cell comprising the isolated nucleic acid molecule or the vector of the present invention. Such host cells include, but are not limited to, a prokaryotic cell, for example an Escherichia coli cell, and a eukaryotic cell such as a yeast cell, an insect cell, a plant cell, and an animal cell (such as, a mammal cell, e.g., a mouse cell, a human cell, etc.). The cell of the present invention can also be a cell line, for example, an HEK293 cell.

[0029] In another aspect, further provided is a method for preparing the antigen-binding unit of the present invention, comprising culturing the host cell of the present invention under suitable conditions, and recovering the antigen-binding unit of the present invention from a cell culture.

[0030] In another aspect, provided herein is a composition, comprising the antigen-binding unit, the isolated nucleic acid molecule, the vector or the host cell as described above.

[0031] In another aspect, provided herein is a kit comprising the antigen-binding unit of the present invention. In some embodiments, the antigen-binding unit of the present invention further comprises a detectable label. In some embodiments, the kit further comprises a second antibody, which specifically recognizes the antigen-binding unit of the present invention. Preferably, the second antibody further comprises a detectable label. Such detectable labels are well known to a person skilled in the art and include, but are not limited to, a radioisotope, a fluorescent material, a luminescent material, a colored material, an enzyme (e.g., horseradish peroxidase), etc.

[0032] In another aspect, provided herein is a method for detecting presence of a novel coronavirus, an S protein thereof or a RBD of the S protein, or a level thereof in a sample, comprising using the antigen-binding unit of the present invention. In some embodiments, the antigen-binding unit of the present invention further comprises a detectable label. In another preferred embodiment, the method further comprises detecting the antigen-binding unit of the present invention by using a second antibody carrying a detectable label. The method can be used for a diagnostic purpose (for example, the sample is a sample from a patient), or for a non-diagnostic purpose (for example, the sample is a cell sample rather than a sample from a patient).

[0033] In another aspect, provided herein is a method for diagnosing whether a subject is infected with a novel coronavirus, comprising: using the antigen-binding unit of the present invention to detect presence of a novel coronavirus, or an S protein thereof or a RBD of the S protein in a sample from the subject. In some embodiments, the antigen-binding unit of the present invention further comprises a detectable label. In another preferred embodiment, the method further comprises detecting the antigen-binding unit of the present invention by using a second antibody carrying a detectable label.

[0034] In another aspect, provided is the use of the antigen-binding unit of the present invention in the preparation of a kit, wherein the kit is used for detecting presence of a novel coronavirus, an S protein thereof or a RBD of the S protein, or a level thereof in a sample, or for diagnosing whether a subject is infected with the novel coronavirus.

[0035] In another aspect, provided herein is a pharmaceutical composition, comprising the antigen-binding unit of the present invention, and a pharmaceutically acceptable carrier and/or excipient.

[0036] In another aspect, provided herein is a method for neutralizing virulence of a novel coronavirus in a sample, comprising contacting the sample comprising the novel coronavirus with the antigen-binding unit of the present invention. Such methods can be used for therapeutic purposes, or for non-therapeutic purposes (for example, the sample is a cell sample, rather than a sample of or from a patient).

[0037] In another aspect, provided is the use of the antigen-binding unit of the present invention for preparing a drug, wherein the drug is used for neutralizing virulence of a novel coronavirus in a sample. In another aspect, provided herein is the antigen-binding unit as described above for neutralizing virulence of a novel coronavirus in a sample.

[0038] In another aspect, provided is the use of the antigen-binding unit of the present invention in the preparation of a pharmaceutical composition, wherein the pharmaceutical composition is used for preventing or treating novel coronavirus infections or diseases related to the novel coronavirus infections (e.g., novel coronavirus pneumonia) of a subject. In another aspect, provided herein is the antigen-binding unit as described above, for preventing and treating novel coronavirus infections or diseases related to the novel coronavirus infections (e.g., novel coronavirus pneumonia) of a subject.

[0039] In another aspect, provided herein is a method for preventing and treating novel coronavirus infections or diseases related to the novel coronavirus infections (e.g., novel coronavirus pneumonia) of a subject, comprising administering to a subject in need thereof a prophylactically or therapeutically effective amount of the antigen-binding unit of the present invention, or the pharmaceutical composition of the present invention.

[0040] In some embodiments, the subject is a mammal, for example human.

[0041] The antigen-binding unit of the present invention, or the pharmaceutical composition of the present invention can be administered to a subject by any suitable route of administration. Such routes of administration include, but are not limited to, oral, buccal, sublingual, topical, parenteral, rectal, intravaginal, or nasal routes.

[0042] The drug and pharmaceutical composition provided in the present invention can be used alone or in combination, or can be used in combination with other pharmacologically active agents (e.g., an antiviral drug, such as favipiravir, remdesivir and interferon). In some embodiments, the pharmaceutical composition also contains a pharmaceutically acceptable carrier and/or excipient.

[0043] In another aspect, provided herein is a conjugate comprising the antigen-binding unit as described above, wherein the antigen-binding unit is conjugated to a chemically functional moiety. In some embodiments, the chemically functional moiety is selected from a radioisotope, an enzyme, a fluorescent compound, a chemiluminescent compound, a bioluminescent compound, a substrate, a cofactor and an inhibitor.

### BRIEF DESCRIPTION OF THE DRAWINGS

[0044] FIGS. 1A-1C exemplarily show SDS-PAGE detection results of antigen-binding units ABU-174, ABU-175 and ABU190.

[0045] FIGS. 2A-2E exemplarily show measurement results regarding the affinity of antigen-binding units ABU-174 (A), ABU-175 (B), ABU190 (C), ABU297 (D) and ABU367 (E) for the S protein by using SPR technology.

[0046] FIGS. 3A-3C exemplarily show measurement results regarding the neutralizing inhibitory activity of antigen-binding units ABU-174 (A), ABU-175 (B) and ABU190 (C) against SARS-CoV-2 pseudovirus.

[0047] FIG. 4 exemplarily shows CPE measurement results regarding the neutralizing inhibitory activity of ABU-175 antibody against SARS-CoV-2 euvirus.

[0048] FIG. 5 exemplarily shows PRNT measurement results of the neutralizing inhibitory activity of antigen-binding units ABU-174, ABU-175 and ABU190 against SARS-CoV-2 euvirus.

### DETAILED DESCRIPTION OF EMBODIMENTS

[0049] While preferred embodiments of the present invention have been shown and described herein, it would have been obvious to a person skilled in the art that such embodiments are provided by way of example only. Numerous variations, changes, and substitutions will now occur to a person skilled in the art without departing from the present invention. It should be understood that various alternatives to the embodiments of the present invention described herein may be employed during practicing the processes described herein. It is intended that the following claims define the scope of the present invention so as to encompass methods and structures within the scope of these claims, and equivalents thereof.

[0050] When a numerical range is provided, it should be understood that each intervening value between the upper and lower limits of that range (accurate to the tenth of the unit of the lower limit, unless the context clearly dictates otherwise) and any other stated or intervening values within the stated range are encompassed within the present invention. The upper and lower limits of these smaller ranges may be independently included in the smaller ranges, and are also encompassed within the present invention, except for any specifically excluded limit within the stated range. Where the stated range encompasses one or both limits, ranges excluding either or both of those limits included therein are also encompassed within the present invention.

[0051] As used herein, the terms “polypeptide”, “peptide” and “protein” are used interchangeably herein to refer to polymers of amino acids of any length. The polymers can be linear, cyclic or branched, can comprise modified amino acids, and can be interrupted by non-amino acids. The terms also include an amino acid polymer that has been modified; for example, by sulfation, glycosylation, lipidation, acetylation, phosphorylation, iodination, methylation, oxidation, proteolytic processing, phosphorylation, prenylation, racemization, selenylation, transfer RNA-mediated addition of an amino acid to a protein (e.g., arginylation), ubiquitination, or any other manipulation, such as conjugation to a labeled component. As used herein, the term “amino acid” refers to natural and/or non-natural or synthetic amino acids, including glycine and a D or L optical isomer, as well as an amino acid analog and a peptidomimetic. A polypeptide or amino acid sequence “derived from” an specified protein refers to the origin of the polypeptide. Preferably, the polypeptide has an amino acid sequence that is substantially identical to the amino acid sequence of the polypeptide encoded in a sequence, or a portion thereof, wherein the portion consists of at least 10-20 amino acids or at least 20-30 amino acids or at least 30-50 amino acids, or can be identified immunologically with the polypeptide encoded in the sequence. The term also includes a polypeptide expressed by a specified nucleic acid sequence. As used herein, the term “domain” refers to a portion of a protein that is physically or functionally distinct from other portions of the protein or peptide. A physically defined domain includes an amino acid sequence which is extremely hydrophobic or hydrophilic, such as those membrane or cytoplasm-bound sequences. A domain can also be defined by internal homology that results, for example, from gene duplication. Functionally defined domains have distinct biological functions. For example, an antigen-binding domain refers to the portion of an antigen-binding unit or antibody that binds to an antigen. A functionally defined domain does not need to be encoded by a contiguous amino acid sequence, and a functionally defined domain can contain one or more physically defined domains.

[0052] As used herein, the term “amino acid” refers to natural and/or non-natural or synthetic amino acids, including but not limited to a D or L optical isomer, as well as an amino acid analog and a peptidomimetic. Standard one-letter or three-letter code is used to designate an amino acid. In the present invention, an amino acid is generally represented by one-letter and three-letter abbreviations well known in the art. For example, alanine can be represented by A or Ala.

[0053] As used herein, the term “antibody” refers to an immunoglobulin molecule generally consisting of two pairs of polypeptide chains, wherein each pair has one “light” (L) chain and one “heavy” (H) chain. Light chains of an antibody can be classified as a κ light chain and a λ light chain. Heavy chains can be classified as μ, δ, γ, α, and ε, and the isotypes of an antibody are defined as IgM, IgD, IgG, IgA, and IgE, respectively. In light and heavy chains, variable regions and constant regions are connected by a “J” region having about 12 or more amino acids, and a heavy chain also contains a “D” region having about 3 or more amino acids. Each heavy chain consists of a heavy chain variable region (VH) and a heavy chain constant region (CH). The heavy chain constant region consists of 3 domains (CH1, CH2 and CH3). Each light chain consists of a light chain variable region (VL) and a light chain constant region (CL). The light chain constant region consists of one domain CL. The constant region of the antibody can mediate the binding of the immunoglobulin to a host tissue or factor, comprising various cells (e.g., effector cells) of the immune system and the first component of the classical complement system (C1q). VH and VL regions can also be subdivided into regions with high variability (called complementarity determining regions (CDRs)), which are interspersed with more conserved regions called framework regions (FRs). Each VH and VL consists of three CDRs and four FRs arranged in the following order: FR1, CDR1, FR2, CDR2, FR3, CDR3, and FR4 from amino terminus to carboxy terminus. The variable regions of each heavy/light chain pair (VH and VL) form an antibody binding site, respectively. Distribution of amino acids in various regions or domains follows the definitions in: Kabat Sequences of Proteins of Immunological Interest (National Institutes of Health, Bethesda, Md. (1987 and 1991)), or Chothia & Lesk (1987) J. Mol. Biol. 196:901-917; Chothia et al. (1989) Nature 342:878-883, or IMGT (ImMunoGenTics) (Lefranc, M.-P., The Immunologist, 7, 132-136 (1999); Lefranc, M.-P. et al., Dev. Comp. Immunol., 27, 55-77 (2003)). Unless indicated otherwise, the CDRs in the VH and VL of the antibody in the present application are defined on the basis of the IMGT numbering system. According to the Kabat numbering system, the CDR amino acid residues in VH are numbered 31-35 (CDR1), 50-65 (CDR2) and 95-102 (CDR3); and the CDR amino acid residues in VL are numbered 24-34 (CDR1), 50-56 (CDR2) and 89-97 (CDR3). According to Chothia, the CDR amino acids in VH are numbered 26-32 (CDR1), 52-56 (CDR2) and 95-102 (CDR3); and the amino acid residues in VL are numbered 24-34 (CDR1), 50-56 (CDR2) and 89-97 (CDR3). According to the IMGT numbering system, the CDR amino acid residues in VH are numbered approximately 26-33 (CDR1), 51-56 (CDR2) and 93-102 (CDR3); and the CDR amino acid residues in VL are numbered approximately 27-32 (CDR1), 50-51 (CDR2) and 89-97 (CDR3) (as disclosed in https://www.novoprolabs.com/tools/cdr).

[0054] The term “antibody” is not limited by any particular method for producing an antibody. For example, the antibody comprises a recombinant antibody, a monoclonal antibody and a polyclonal antibody. The antibody can be antibodies of different isotypes, for example, an IgG (e.g., an IgG1, IgG2, IgG3 or IgG4 subtype), IgA1, IgA2, IgD, IgE or IgM antibody.

[0055] As used herein, the term “antigen-binding fragment” of an antibody refers to a polypeptide comprising a fragment of a full-length antibody that retains the ability to specifically bind to the same antigen to which the full-length antibody binds and/or competes with the full-length antibody for specific binding to the antigen, which is also referred to as an “antigen-binding moiety”. See generally, Fundamental Immunology, Ch. 7 Paul, W., ed., 2nd Edition, Raven Press, N.Y. (1989), which is incorporated herein by reference in its entirety for all purposes. An antigen-binding fragment of an antibody can be generated by recombinant DNA techniques or by enzymatic or chemical cleavage of an intact antibody. In some cases, an antigen-binding fragment comprises Fab, Fab′, F(ab′)₂, Fd, Fv, dAb and a complementarity determining region (CDR) fragment, a single chain antibody (e.g., scFv), a chimeric antibody, a diabody and a polypeptide comprising at least a portion of an antibody sufficient to confer a specific antigen-binding ability to the polypeptide. In some cases, an antigen-binding fragment of an antibody is a single chain antibody (e.g., scFv), wherein VL and VH domains are paired by a linker which enables them to be produced as a single polypeptide chain, thereby forming a monovalent molecule (see, e.g., Bird et al., Science 242:423 426 (1988) and Huston et al., Proc. Natl. Acad. Sci. USA 85:5879 5883 (1988)). Such scFv molecules can have a general structure of NH2-VL-linker-VH—COOH or NH2-VH-linker-VL-COOH. Suitable linkers in the prior art consist of a repeated GGGGS amino acid sequence or a variant thereof. For example, a linker having an amino acid sequence (GGGGS)₄ can be used, and a variant thereof can also be used (Holliger et al. (1993), Proc. Natl. Acad. Sci. USA 90: 6444-6448). Other linkers which can be used in the present invention are described in Alfthan et al. (1995), Protein Eng. 8:725-731, Choi et al. (2001), Eur. J. Immunol. 31: 94-106, Hu et al. (1996), Cancer Res. 56:3055-3061, Kipriyanov et al. (1999), J. Mol. Biol. 293:41-56 and Roovers et al. (2001), Cancer Immunol.

[0056] In some cases, an antigen-binding fragment of an antibody is a diabody, i.e., a bivalent antibody, wherein VH and VL domains are expressed on a single polypeptide chain; however, the linker used is too short to allow pairing between the two domains of the same chain, thereby forcing the domain to pair with the complementary domains of another chain and producing two antigen-binding sites (see, e.g., Holliger P. et al., Proc. Natl. Acad. Sci. USA 90:6444 6448 (1993), and Poljak R. J. et al., Structure 2:1121 1123 (1994)).

[0057] An antigen-binding fragment of an antibody (e.g., the above-mentioned antibody fragment) can be obtained from a given antibody (e.g., the antibody provided in the present invention) by using conventional techniques known to a person skilled in the art (e.g., recombinant DNA techniques or enzymatic or chemical cleavage) and the antigen-binding fragment of the antibody can be screened for specificity in the same manner as for an intact antibody.

[0058] Unless the context clearly dictates, the term “antibody” when referred to herein comprises not only an intact antibody but also an antigen-binding fragment of an antibody.

[0059] Unless the context clearly dictates, the term “antigen-binding unit” herein includes the antibody and the antigen-binding fragment thereof as defined above.

[0060] As used herein, the term “monoclonal antibody” refers to an antibody or a fragment of an antibody from a population of highly homologous antibody molecules, i.e., a population of identical antibody molecules, except for possible naturally occurring mutations. The monoclonal antibody is highly specific for a single epitope on an antigen. Relative to a monoclonal antibody, a polyclonal antibody generally comprises at least 2 or more different antibodies, and these different antibodies generally recognize different epitopes on an antigen. A monoclonal antibody can usually be obtained by using the hybridoma technique first reported by Kohler et al. (Nature, 256:495, 1975), and can also be obtained by using recombinant DNA techniques (for example, see Journal of virological methods, 2009, 158(1-2): 171-179).

[0061] As used herein, a “neutralizing antibody” refers to an antibody or antibody fragment that can clear or significantly reduce virulence (e.g., ability to infect cells) of a target virus.

[0062] As used herein, in the case of a polypeptide, a “sequence” is the order of amino acids in the polypeptide that are arranged in the direction from the amino terminus to the carboxy terminus, wherein residues adjacent to each other in the sequence are contiguous in the primary structure of the polypeptide. The sequence can also be a linear sequence of a portion of a polypeptide known to contain additional residues in one or both directions.

[0063] As used herein, “identity”, “homology” or “sequence identity” refers to the sequence similarity or interchangeability between two or more polynucleotide sequences or between two or more polypeptide sequences. When a program, such as Emboss Needle or BestFit is used to determine sequence identity, similarity or homology between two different amino acid sequences, a default setting can be used, or an appropriate scoring matrix, such as blosum45 or blosum80, can be selected to optimize the score of identity, similarity or homology. Preferably, homologous polynucleotides are those polynucleotides that hybridize under stringent conditions as defined herein and have at least 70%, preferably at least 80%, more preferably at least 90%, more preferably 95%, more preferably 97%, more preferably 98% and even more preferably 99% sequence identity to these sequences. When sequences of comparable lengths are optimally aligned, the homologous polypeptide preferably has at least 80%, or at least 90%, or at least 95%, or at least 97%, or at least 98% sequence identity, or at least 99% sequence identity.

[0064] With respect to the antigen-binding units determined herein, “percent sequence identity (%)” is defined as the percentage of amino acid residues in the query sequence that are identical to amino acid residues of the second, reference polypeptide sequence or a portion thereof, after aligning the sequences and introducing gaps, if necessary, to achieve maximum percentage of sequence identity, and not considering any conservative replacements as a part of sequence identity. The alignment aimed at determining the percent amino acid sequence identity can be achieved in various ways within the skill in the art, for example, by using a publicly available computer software, such as BLAST, BLAST-2, ALIGN, NEEDLE or Megalign (DNASTAR) software. A person skilled in the art can determine appropriate parameters for measuring the alignment, including any algorithm needed to achieve the maximal alignment over the full length of the sequences being compared. The percent identity may be measured over the length of the entire defined polypeptide sequence, or may be measured over a shorter length, for example, over the length of a fragment taken from a larger, defined polypeptide sequence, such as a fragment of at least 5, at least 10, at least 15, at least 20, at least 50, at least 100 or at least 200 contiguous residues. These lengths are exemplary only, and it should be understood that any fragment length supported by the sequences shown in the Tables, Figures or Sequence Listing of the present invention can be used to describe the length over which percent identity can be measured.

[0065] The antigen-binding unit described herein may have one or more modifications relative to a reference sequence. The modifications may be deletions, insertions or additions, or substitutions or replacements of amino acid residues. “Deletion” refers to a change in an amino acid sequence due to the lack of one or more amino acid residues. “Insertion” or “addition” refers to a change in an amino acid sequence due to the addition of one or more amino acid residues compared with a reference sequence. “Substitution” or “replacement” refers to that one or more amino acids are substituted with different amino acids. In the present invention, mutations of the antigen-binding unit relative to the reference sequence can be determined by comparing the antigen-binding unit with the reference sequence. Optimal alignment of sequences for comparison can be performed according to any method known in the art.

[0066] As used herein, the term “antigen” refers to a substance that is recognized and specifically bound by an antigen-binding unit. An antigen can include a peptide, a protein, a glycoprotein, a polysaccharide, and a lipid; a portion thereof, and a combination thereof. Non-limiting exemplary antigens include a protein from a coronavirus such as SARS-CoV-2, and other homologs thereof.

[0067] As used herein, the term “isolated” refers to being isolated from cellular and other ingredients with which polynucleotides, peptides, polypeptides, proteins, antibodies or fragments thereof are associated under normal circumstances in nature. It is known to a person skilled in the art that a non-naturally occurring polynucleotide, peptide, polypeptide, protein, antibody or a fragment thereof does not need to be “isolated” to distinguish same from a naturally occurring counterpart thereof. In addition, the “concentrated”, “isolated” or “diluted” polynucleotide, peptide, polypeptide, protein, antibody, or the fragment thereof is distinguishable from the naturally occurring counterpart thereof, because the concentration or number of molecules per unit volume is greater than (“concentrated”) or less than the naturally occurring counterpart thereof (“isolated”). Enrichment may be measured on the basis of an absolute amount, such as the weight of a solution per unit volume, or same can be measured relative to a second, potentially interfering substance present in the source mixture.

[0068] The terms “polynucleotides”, “nucleic acids”, “nucleotides” and “oligonucleotides” are used interchangeably. They refer to polymerized nucleotides (deoxyribonucleotides or ribonucleotides) or analogs thereof of any length. A polynucleotide can have any three-dimensional structure and can perform any known or unknown function. The following are non-limiting examples of a polynucleotide: a coding region or a non-coding region of a gene or a gene fragment, a locus determined by linkage analysis, an exon, an intron, messenger RNA (mRNA), transfer RNA, ribosomal RNA, a ribozyme, cDNA, a recombinant polynucleotide, a branched polynucleotide, a plasmid, a vector, an isolated DNA of any sequence, an isolated RNA of any sequence, a nucleic acid probe, a primer, an oligonucleotide, or a synthetic DNA. A polynucleotide may contain a modified nucleotide, such as a methylated nucleotide, and a nucleotide analog. If present, a modification to a nucleotide structure can be implemented before or after the assembly of a polymer. The sequence of a nucleotide can be interrupted by non-nucleotide components. A polynucleotide can be further modified after polymerization, for example, by conjugation with a labeled component.

[0069] When used for a polynucleotide, “recombinant” means that the polynucleotide is a product of various combinations of cloning, restriction digestion and/or ligation steps, and other procedures that produce a construct different from the polynucleotide found in nature.

[0070] The term “gene” or “gene fragment” can be used interchangeably herein. They refer to polynucleotides containing at least one open reading frame capable of encoding a specific protein following transcription and translation. The gene or gene fragment may be genomic, cDNA, or synthetic, as long as the polynucleotide contains at least one open reading frame, which may cover the entire coding region or a segment thereof.

[0071] The term “operably linked” or “effectively linked” refers to the state of being juxtaposed in which the components so described are allowed to function in a intended manner. For example, if a promoter sequence promotes the transcription of a coding sequence, the promoter sequence is operably linked to the coding sequence.

[0072] As used herein, “expression” refers to the process by which polynucleotides are transcribed into mRNA, and/or the process by which the transcribed mRNA (also called “transcript”) is subsequently translated into peptides, polypeptides or proteins. The transcript and the encoded polypeptide are collectively referred to as the gene product. If the polynucleotide is derived from genomic DNA, the expression can include splicing of mRNA in an eukaryotic cell.

[0073] As used herein, the term “vector” refers to a nucleic acid delivery vehicle into which a polynucleotide can be inserted. When the vector allows for the expression of the protein encoded by the inserted polynucleotide, the vector is called an expression vector. A vector can be introduced into a host cell by transformation, transduction or transfection, and the genetic substance elements carried thereby can be expressed in the host cell. The vector is well known to a person skilled in the art, and includes but is not limited to: a plasmid; a phagemid; an artificial chromosome such as a yeast artificial chromosome (YAC), a bacterial artificial chromosome (BAC) or a P1-derived artificial chromosome (PAC); a phage such as a λ phage or an M13 phage, and an animal virus. The animal virus that can be used as a vector includes but is not limited to a retrovirus (comprising a lentivirus), an adenovirus, an adeno-associated virus, a herpes virus (e.g., a herpes simplex virus), a poxvirus, a baculovirus, a papilloma virus and a papovavirus (such as SV40). A vector can contain a variety of elements that control expression, including, but not limited to: a promoter sequence, a transcription initiation sequence, an enhancer sequence, a selection element, and a reporter gene. In addition, the vector also can contain a replication initiation site.

[0074] As used herein, the term “host cell” refers to a cell that can be used to introduce a vector, including but not limited to a prokaryotic cell such as Escherichia coli or Bacillus subtilis, a fungal cell such as a yeast cell or Aspergillus, an insect cell such as Drosophila S2 cell or Sf9, and an animal cell such as a fibroblast, a CHO cell, a COS cell, a NSO cell, an HeLa cell, a BHK cell, an HEK293 cell or a human cell.

[0075] As used herein, the term “biological sample” includes various types of samples obtained from an organism and can be used in a diagnostic or monitoring experiment. The term includes blood and other liquid samples derived from an organism, a solid tissue sample such as a biopsy specimen or tissue culture, or a cell derived therefrom and a progeny thereof. The term includes a sample that has been treated in any way following acquisition, such as by treatment with a reagent, dissolution, or enrichment of certain components. The term includes a clinical sample, and further includes cells in a cell culture, a cell supernatant, a cell lysate, serum, plasma, a biological fluid, and a tissue sample.

[0076] As used herein, the terms “recipient”, “individual”, “subject”, “host” and “patient” are used interchangeably herein and refer to any mammalian subject, particularly human, for whom diagnosis, treatment or treating is desired.

[0077] As used herein, the terms “treating”, “treatment”, etc. are used herein to generally refer to a process of obtaining a desired pharmacological and/or physiological effect. The effect may be prophylactic in terms of completely or partially preventing a disease or a symptom thereof, and/or may be therapeutic in terms of partially or completely stabilizing or curing a disease and/or adverse effects attributable to the disease. “Treating” as used herein encompasses any treatment of a disease in a mammal, such as a mouse, a rat, a rabbit, a pig, and a primate including human and other apes, particularly human, and the term includes: (a) preventing the occurrence of a disease or symptom in a subject who may be susceptible to the disease or symptom but has not yet been diagnosed; (b) inhibiting the symptom of the disease; (c) preventing the progression of the disease; (d) alleviating the symptom of the disease; (e) causing regression of the diseases or symptom; or any combination thereof. As used herein, the term “specifically binding” refers to a non-random binding reaction between two molecules, such as a reaction between an antibody and its corresponding antigen. In certain embodiments, an antibody specifically binding to an antigen (or an antibody specific for an antigen) refers to an antibody that binds to the antigen with an affinity (KD) less than about 10⁻⁵ M, for example less than about 10⁻⁶ M, 10⁻⁷ M, 10⁻⁸ M, 10⁻⁹ M or 10⁻¹⁰ M or less.

[0078] As used herein, the term “KD” refers to the dissociation equilibrium constant of a particular antibody-antigen interaction, which is used to describe the binding affinity between an antibody and an antigen. In the present invention, KD is defined as the ratio of two kinetic rate constants Ka/Kd, wherein “Ka” refers to the rate constant for the binding of an antibody to an antigen and “Kd” refers to the rate constant for the dissociation of the antibody from the antibody/antigen complex. The smaller the equilibrium dissociation constant KD, the tighter the antibody-antigen-binding and the higher the affinity between the antibody and the antigen. Generally, an antibody binds to an antigen with a dissociation equilibrium constant (KD) less than about 10⁻⁵ M. The property of the specific binding between two molecules can be determined using a method well known in the art, e.g. determined by surface plasmon resonance (SPR) in a BIACORE instrument.

[0079] As used herein, the term “neutralizing activity” refers to the functional activity of an antibody or antibody fragment binding to an antigen protein on a virus, thereby preventing viral infection of cells and/or maturation of viral progeny and/or release of viral progeny. The antibody or antibody fragment with a neutralizing activity can prevent the amplification of the virus, thereby inhibiting or eliminating virus infection. In some embodiments, the neutralizing activity is represented by the IC₅₀ of an antibody or an antibody fragment in term of viral inhibition. The “half-maximal inhibitory concentration” (IC₅₀) is a measure of a drug, such as an antibody, in terms of inhibiting biological or biochemical functions, etc., such as viral potency. The IC₅₀ herein is calculated by a Reed-Muench method according to the neutralization inhibition rate of the antigen-binding fragment against viral (e.g., pseudoviral or euviral) infection in a cell. Provided herein is an antigen-binding unit which can specifically recognize and target an S protein of a novel coronavirus, particularly a receptor binding domain (RBD) of the S protein, and shows an efficient ability to neutralize the virus. Therefore, the antigen-binding unit of the present invention is particularly suitable for diagnosing, preventing and treating novel coronavirus infections or diseases related to the novel coronavirus infections (e.g., novel coronavirus pneumonia).

### Antigen-Binding Unit

[0080] In one aspect, the antigen-binding unit of the present invention comprises a heavy chain variable region (VH) and a light chain variable region (VL), wherein the heavy chain variable region comprises VH CDR1, VH CDR2 and VH CDR3, and the light chain variable region comprises VL CDR1, VL CDR2 and VL CDR3.

[0081] The VH of the antigen-binding unit of the present invention can comprise a sequence selected from SEQ ID NOs: 721-1080 and 3111-3145, a sequence comprising one or more amino acid additions, deletions, or substitutions compared with a sequence selected from SEQ ID NOs: 721-1080 and 3111-3145, or a sequence having at least 80%, 85%, 90%, 91%, 92%, 93%, 94%, 95%, 96%, 97%, 98%, 99% or 99% identity to a sequence selected from SEQ ID NOs: 721-1080 and 3111-3145. When the VH of the antigen-binding unit of the present invention has amino acid additions, deletions, or substitutions compared with the reference polypeptide sequence, the VH of the antigen-binding unit of the present invention can have 1, 2, 3, 4, 5, 6, 7, 8, 9, 10, 11, 12, 13, 14, 15, 16, 17, 18, 19 or 20 additions, deletions, or substitutions compared with the reference polypeptide. When the VH of the antigen-binding unit of the present invention has amino acid additions, deletions, or substitutions compared with the reference polypeptide sequence, the VH of the antigen-binding unit of the present invention can have more than 1, 2, 3, 4, 5, 6, 7, 8, 9, 10, 11, 12, 13, 14, 15, 16, 17, 18, 19 or 20 additions, deletions, or substitutions compared with the reference polypeptide. When the VH of the antigen-binding unit of the present invention has amino acid additions, deletions, or substitutions compared with the reference polypeptide sequence, the VH of the antigen-binding unit of the present invention can have less than 2, 3, 4, 5, 6, 7, 8, 9, 10, 11, 12, 13, 14, 15, 16, 17, 18, 19 or 20 additions, deletions, or substitutions compared with the reference polypeptide.

[0082] The VH CDR1 of the antigen-binding unit of the present invention can comprise a sequence selected from SEQ ID NOs: 1461-1820 and 2901-2935, a sequence comprising one or more amino acid additions, deletions, or substitutions compared with a sequence selected from SEQ ID NOs: 1461-1820 and 2901-2935, or a sequence having at least 80%, 85%, 90%, 91%, 92%, 93%, 94%, 95%, 96%, 97%, 98%, 99% or 99% identity to a sequence selected from SEQ ID NOs: 1461-1820 and 2901-2935. When the VH CDR1 of the antigen-binding unit of the present invention has amino acid additions, deletions, or substitutions compared with the reference polypeptide sequence, the VH CDR1 of the antigen-binding unit of the present invention can have 1, 2, 3, 4 or 5 additions, deletions, or substitutions compared with the reference polypeptide. When the VH CDR1 of the antigen-binding unit of the present invention has amino acid additions, deletions, or substitutions compared with the reference polypeptide sequence, the VH CDR1 of the antigen-binding unit of the present invention can have more than 1, 2, 3, 4, or 5 additions, deletions, or substitutions compared with the reference polypeptide. When the VH CDR1 of the antigen-binding unit of the present invention has amino acid additions, deletions, or substitutions compared with the reference polypeptide sequence, the VH CDR1 of the antigen-binding unit of the present invention can have less than 2, 3, 4, or 5 additions, deletions, or substitutions compared with the reference polypeptide.

[0083] The VH CDR2 of the antigen-binding unit of the present invention can comprise a sequence selected from SEQ ID NOs: 1821-2180 and 2936-2970, a sequence comprising one or more amino acid additions, deletions, or substitutions compared with a sequence selected from SEQ ID NOs: 1821-2180 and 2936-2970, or a sequence having at least 80%, 85%, 90%, 91%, 92%, 93%, 94%, 95%, 96%, 97%, 98%, 99% or 99% identity to a sequence selected from SEQ ID NOs: 1821-2180 and 2936-2970. When the VH CDR2 of the antigen-binding unit of the present invention has amino acid additions, deletions, or substitutions compared with the reference polypeptide sequence, the VH CDR2 of the antigen-binding unit of the present invention can have 1, 2, 3, 4 or 5 additions, deletions, or substitutions compared with the reference polypeptide. When the VH CDR2 of the antigen-binding unit of the present invention has amino acid additions, deletions, or substitutions compared with the reference polypeptide sequence, the VH CDR2 of the antigen-binding unit of the present invention can have more than 1, 2, 3, 4, or 5 additions, deletions, or substitutions compared with the reference polypeptide. When the VH CDR2 of the antigen-binding unit of the present invention has amino acid additions, deletions, or substitutions compared with the reference polypeptide sequence, the VH CDR2 of the antigen-binding unit of the present invention can have less than 2, 3, 4, or 5 additions, deletions, or substitutions compared with the reference polypeptide.

[0084] The VH CDR3 of the antigen-binding unit of the present invention can comprise a sequence selected from SEQ ID NOs: 1-360 and 2971-3005, a sequence comprising one or more amino acid additions, deletions, or substitutions compared with a sequence selected from SEQ ID NOs: 1-360 and 2971-3005, or a sequence having at least 80%, 85%, 90%, 91%, 92%, 93%, 94%, 95%, 96%, 97%, 98%, 99% or 99% identity to a sequence selected from SEQ ID NOs: 1-360 and 2971-3005. When the VH CDR3 of the antigen-binding unit of the present invention has amino acid additions, deletions, or substitutions compared with the reference polypeptide sequence, the VH CDR3 of the antigen-binding unit of the present invention can have 1, 2, 3, 4 or 5 additions, deletions, or substitutions compared with the reference polypeptide. When the VH CDR3 of the antigen-binding unit of the present invention has amino acid additions, deletions, or substitutions compared with the reference polypeptide sequence, the VH CDR3 of the antigen-binding unit of the present invention can have more than 1, 2, 3, 4, or 5 additions, deletions, or substitutions compared with the reference polypeptide. When the VH CDR2 of the antigen-binding unit of the present invention has amino acid additions, deletions, or substitutions compared with the reference polypeptide sequence, the VH CDR3 of the antigen-binding unit of the present invention can have less than 2, 3, 4, or 5 additions, deletions, or substitutions compared with the reference polypeptide.

[0085] The VL of the antigen-binding unit of the present invention can comprise a sequence selected from SEQ ID NOs: 1081-1440 and 3146-3180, a sequence comprising one or more amino acid additions, deletions, or substitutions compared with a sequence selected from SEQ ID NOs: 1081-1440 and 3146-3180, or a sequence having at least 80%, 85%, 90%, 91%, 92%, 93%, 94%, 95%, 96%, 97%, 98%, 99% or 99% identity to a sequence selected from SEQ ID NOs: 1081-1440 and 3146-3180. When the VL of the antigen-binding unit of the present invention has amino acid additions, deletions, or substitutions compared with the reference polypeptide sequence, the VL of the antigen-binding unit of the present invention can have 1, 2, 3, 4, 5, 6, 7, 8, 9, 10, 11, 12, 13, 14, 15, 16, 17, 18, 19 or 20 additions, deletions, or substitutions compared with the reference polypeptide. When the VL of the antigen-binding unit of the present invention has amino acid additions, deletions, or substitutions compared with the reference polypeptide sequence, the VL of the antigen-binding unit of the present invention can have more than 1, 2, 3, 4, 5, 6, 7, 8, 9, 10, 11, 12, 13, 14, 15, 16, 17, 18, 19 or 20 amino acid additions, deletions, or substitutions compared with the reference polypeptide. When the VL of the antigen-binding unit of the present invention has amino acid additions, deletions, or substitutions compared with the reference polypeptide sequence, the VL of the antigen-binding unit of the present invention can have less than 2, 3, 4, 5, 6, 7, 8, 9, 10, 11, 12, 13, 14, 15, 16, 17, 18, 19 or 20 additions, deletions, or substitutions compared with the reference polypeptide.

[0086] The VL CDR1 of the antigen-binding unit of the present invention can comprise a sequence selected from SEQ ID NOs: 2181-2540 and 3006-3040, a sequence comprising one or more amino acid additions, deletions, or substitutions compared with a sequence selected from SEQ ID NOs: 2181-2540 and 3006-3040, or a sequence having at least 80%, 85%, 90%, 91%, 92%, 93%, 94%, 95%, 96%, 97%, 98%, 99% or 99% identity to a sequence selected from SEQ ID NOs: 2181-2540 and 3006-3040. When the VL CDR1 of the antigen-binding unit of the present invention has amino acid additions, deletions, or substitutions compared with the reference polypeptide sequence, the VL CDR1 of the antigen-binding unit of the present invention can have 1, 2, 3, 4 or 5 additions, deletions, or substitutions compared with the reference polypeptide. When the VL CDR1 of the antigen-binding unit of the present invention has amino acid additions, deletions, or substitutions compared with the reference polypeptide sequence, the VL CDR1 of the antigen-binding unit of the present invention can have more than 1, 2, 3, 4, or 5 additions, deletions, or substitutions compared with the reference polypeptide. When the VL CDR1 of the antigen-binding unit of the present invention has amino acid additions, deletions, or substitutions compared with the reference polypeptide sequence, the VL CDR1 of the antigen-binding unit of the present invention can have less than 2, 3, 4, or 5 additions, deletions, or substitutions compared with the reference polypeptide.

[0087] The VL CDR2 of the antigen-binding unit of the present invention can comprise a sequence selected from SEQ ID NOs: 2541-2900 and 3041-3075, a sequence comprising one or more amino acid additions, deletions, or substitutions compared with a sequence selected from SEQ ID NOs: 2541-2900 and 3041-3075, or a sequence having at least 80%, 85%, 90%, 91%, 92%, 93%, 94%, 95%, 96%, 97%, 98%, 99% or 99% identity to a sequence selected from SEQ ID NOs: 2541-2900 and 3041-3075. When the VL CDR2 of the antigen-binding unit of the present invention has amino acid additions, deletions, or substitutions compared with the reference polypeptide sequence, the VL CDR2 of the antigen-binding unit of the present invention can have 1, 2, 3, 4 or 5 additions, deletions, or substitutions compared with the reference polypeptide. When the VL CDR2 of the antigen-binding unit of the present invention has amino acid additions, deletions, or substitutions compared with the reference polypeptide sequence, the VL CDR2 of the antigen-binding unit of the present invention can have more than 1, 2, 3, 4, or 5 additions, deletions, or substitutions compared with the reference polypeptide. When the VL CDR2 of the antigen-binding unit of the present invention has amino acid additions, deletions, or substitutions compared with the reference polypeptide sequence, the VL CDR2 of the antigen-binding unit of the present invention can have less than 2, 3, 4, or 5 additions, deletions, or substitutions compared with the reference polypeptide.

[0088] The VL CDR3 of the antigen-binding unit of the present invention can comprise a sequence selected from SEQ ID NOs: 361-720 and 3076-3110, a sequence comprising one or more amino acid additions, deletions, or substitutions compared with a sequence selected from SEQ ID NOs: 361-720 and 3076-3110, or a sequence having at least 80%, 85%, 90%, 91%, 92%, 93%, 94%, 95%, 96%, 97%, 98%, 99% or 99% identity to a sequence selected from SEQ ID NOs: 361-720 and 3076-3110. When the VL CDR3 of the antigen-binding unit of the present invention has amino acid additions, deletions, or substitutions compared with the reference polypeptide sequence, the VL CDR3 of the antigen-binding unit of the present invention can have 1, 2, 3, 4 or 5 additions, deletions, or substitutions compared with the reference polypeptide. When the VL CDR3 of the antigen-binding unit of the present invention has amino acid additions, deletions, or substitutions compared with the reference polypeptide sequence, the VL CDR3 of the antigen-binding unit of the present invention can have more than 1, 2, 3, 4, or 5 additions, deletions, or substitutions compared with the reference polypeptide. When the VL CDR3 of the antigen-binding unit of the present invention has amino acid additions, deletions, or substitutions compared with the reference polypeptide sequence, the VL CDR3 of the antigen-binding unit of the present invention can have less than 2, 3, 4, or 5 additions, deletions, or substitutions compared with the reference polypeptide.

[0089] The VH CDR1 of the antigen-binding unit of the present invention can comprise a sequence selected from SEQ ID NOs: 1461-1820 and 2901-2935, a sequence comprising one or more amino acid additions, deletions, or substitutions compared with a sequence selected from SEQ ID NOs: 1461-1820 and 2901-2935, or a sequence having at least 80%, 85%, 90%, 91%, 92%, 93%, 94%, 95%, 96%, 97%, 98%, 99% or 99% identity to a sequence selected from SEQ ID NOs: 1461-1820 and 2901-2935; and the VL CDR1 of the antigen-binding unit of the present invention can comprise a sequence selected from SEQ ID NOs: 2181-2540 and 3006-3040, a sequence comprising one or more amino acid additions, deletions, or substitutions compared with a sequence selected from SEQ ID NOs: 2181-2540 and 3006-3040, or a sequence having at least 80%, 85%, 90%, 91%, 92%, 93%, 94%, 95%, 96%, 97%, 98%, 99% or 99% identity to a sequence selected from SEQ ID NOs: 2181-2540 and 3006-3040.

[0090] The VH CDR2 of the antigen-binding unit of the present invention can comprise a sequence selected from SEQ ID NOs: 1821-2180 and 2936-2970, a sequence comprising one or more amino acid additions, deletions, or substitutions compared with a sequence selected from SEQ ID NOs: 1821-2180 and 2936-2970, or a sequence having at least 80%, 85%, 90%, 91%, 92%, 93%, 94%, 95%, 96%, 97%, 98%, 99% or 99% identity to a sequence selected from SEQ ID NOs: 1821-2180 and 2936-2970; and the VL CDR2 of the antigen-binding unit of the present invention can comprise a sequence selected from SEQ ID NOs: 2541-2900 and 3041-3075, a sequence comprising one or more amino acid additions, deletions, or substitutions compared with a sequence selected from SEQ ID NOs: 2541-2900 and 3041-3075, or a sequence having at least 80%, 85%, 90%, 91%, 92%, 93%, 94%, 95%, 96%, 97%, 98%, 99% or 99% identity to a sequence selected from SEQ ID NOs: 2541-2900 and 3041-3075.

[0091] The VH CDR3 of the antigen-binding unit of the present invention can comprise a sequence selected from SEQ ID NOs: 1-360 and 2971-3005, a sequence comprising one or more amino acid additions, deletions, or substitutions compared with a sequence selected from SEQ ID NOs: 1-360 and 2971-3005, or a sequence having at least 80%, 85%, 90%, 91%, 92%, 93%, 94%, 95%, 96%, 97%, 98%, 99% or 99% identity to a sequence selected from SEQ ID NOs: 1-360 and 2971-3005; and the VL CDR3 of the antigen-binding unit of the present invention can comprise a sequence selected from SEQ ID NOs: 361-720 and 3076-3110, a sequence comprising one or more amino acid additions, deletions, or substitutions compared with a sequence selected from SEQ ID NOs: 361-720 and 3076-3110, or a sequence having at least 80%, 85%, 90%, 91%, 92%, 93%, 94%, 95%, 96%, 97%, 98%, 99% or 99% identity to a sequence selected from SEQ ID NOs: 361-720 and 3076-3110.

[0092] The VH of the antigen-binding unit of the present invention can comprise VH CDR1, VH CDR2 and VH CDR3, wherein the VH CDR1 is a sequence selected from SEQ ID NOs: 1461-1820 and 2901-2935, a sequence comprising one or more amino acid additions, deletions, or substitutions compared with a sequence selected from SEQ ID NOs: 1461-1820 and 2901-2935, or a sequence having at least 80%, 85%, 90%, 91%, 92%, 93%, 94%, 95%, 96%, 97%, 98%, 99% or 99% identity to a sequence selected from SEQ ID NOs: 1461-1820 and 2901-2935; wherein the VH CDR2 is a sequence selected from SEQ ID NOs: 1821-2180 and 2936-2970, a sequence comprising one or more amino acid additions, deletions, or substitutions compared with a sequence selected from SEQ ID NOs: 1821-2180 and 2936-2970, or a sequence having at least 80%, 85%, 90%, 91%, 92%, 93%, 94%, 95%, 96%, 97%, 98%, 99% or 99% identity to a sequence selected from SEQ ID NOs: 1821-2180 and 2936-2970; and wherein the VH CDR3 is a sequence selected from SEQ ID NOs: 1-360 and 2971-3005, a sequence comprising one or more amino acid additions, deletions, or substitutions compared with a sequence selected from SEQ ID NOs: 1-360 and 2971-3005, or a sequence having at least 80%, 85%, 90%, 91%, 92%, 93%, 94%, 95%, 96%, 97%, 98%, 99% or 99% identity to a sequence selected from SEQ ID NOs: 1-360 and 2971-3005.

[0093] The VL of the antigen-binding unit of the present invention can comprise VL CDR1, VL CDR2 and VL CDR3, wherein the VL CDR1 is a sequence selected from SEQ ID NOs: 2181-2540 and 3006-3040, a sequence comprising one or more amino acid additions, deletions, or substitutions compared with a sequence selected from SEQ ID NOs: 2181-2540 and 3006-3040, or a sequence having at least 80%, 85%, 90%, 91%, 92%, 93%, 94%, 95%, 96%, 97%, 98%, 99% or 99% identity to a sequence selected from SEQ ID NOs: 2181-2540 and 3006-3040; wherein the VL CDR2 is a sequence selected from SEQ ID NOs: 2541-2900 and 3041-3075, a sequence comprising one or more amino acid additions, deletions, or substitutions compared with a sequence selected from SEQ ID NOs: 2541-2900 and 3041-3075, or a sequence having at least 80%, 85%, 90%, 91%, 92%, 93%, 94%, 95%, 96%, 97%, 98%, 99% or 99% identity to a sequence selected from SEQ ID NOs: 2541-2900 and 3041-3075; and wherein the VL CDR3 is a sequence selected from SEQ ID NOs: 361-720 and 3076-3110, a sequence comprising one or more amino acid additions, deletions, or substitutions compared with a sequence selected from SEQ ID NOs: 361-720 and 3076-3110, or a sequence having at least 80%, 85%, 90%, 91%, 92%, 93%, 94%, 95%, 96%, 97%, 98%, 99% or 99% identity to a sequence selected from SEQ ID NOs: 361-720 and 3076-3110.

[0094] The VH of the antigen-binding unit described herein can comprise a sequence selected from combinations of CDR1, CDR2, and CDR3 as following:

| HCDR1 | HCDR2 | HCDR3 | ABU No. | HCDR1 | HCDR2 | HCDR3 | ABU No. | HCDR1 | HCDR2 | HCDR3 | ABU No. |
|---|---|---|---|---|---|---|---|---|---|---|---|
| 1461 | 1821 | 1 | ABU-1 | 1581 | 1941 | 121 | ABU-121 | 1701 | 2061 | 241 | ABU-241 |
| 1462 | 1822 | 2 | ABU-2 | 1582 | 1942 | 122 | ABU-122 | 1702 | 2062 | 242 | ABU-242 |
| 1463 | 1823 | 3 | ABU-3 | 1583 | 1943 | 123 | ABU-123 | 1703 | 2063 | 243 | ABU-243 |
| 1464 | 1824 | 4 | ABU-4 | 1584 | 1944 | 124 | ABU-124 | 1704 | 2064 | 244 | ABU-244 |
| 1465 | 1825 | 5 | ABU-5 | 1585 | 1945 | 125 | ABU-125 | 1705 | 2065 | 245 | ABU-245 |
| 1466 | 1826 | 6 | ABU-6 | 1586 | 1946 | 126 | ABU-126 | 1706 | 2066 | 246 | ABU-246 |
| 1467 | 1827 | 7 | ABU-7 | 1587 | 1947 | 127 | ABU-127 | 1707 | 2067 | 247 | ABU-247 |
| 1468 | 1828 | 8 | ABU-8 | 1588 | 1948 | 128 | ABU-128 | 1708 | 2068 | 248 | ABU-248 |
| 1469 | 1829 | 9 | ABU-9 | 1589 | 1949 | 129 | ABU-129 | 1709 | 2069 | 249 | ABU-249 |
| 1470 | 1830 | 10 | ABU-10 | 1590 | 1950 | 130 | ABU-130 | 1710 | 2070 | 250 | ABU-250 |
| 1471 | 1831 | 11 | ABU-11 | 1591 | 1951 | 131 | ABU-131 | 1711 | 2071 | 251 | ABU-251 |
| 1472 | 1832 | 12 | ABU-12 | 1592 | 1952 | 132 | ABU-132 | 1712 | 2072 | 252 | ABU-252 |
| 1473 | 1833 | 13 | ABU-13 | 1593 | 1953 | 133 | ABU-133 | 1713 | 2073 | 253 | ABU-253 |
| 1474 | 1834 | 14 | ABU-14 | 1594 | 1954 | 134 | ABU-134 | 1714 | 2074 | 254 | ABU-254 |
| 1475 | 1835 | 15 | ABU-15 | 1595 | 1955 | 135 | ABU-135 | 1715 | 2075 | 255 | ABU-255 |
| 1476 | 1836 | 16 | ABU-16 | 1596 | 1956 | 136 | ABU-136 | 1716 | 2076 | 256 | ABU-256 |
| 1477 | 1837 | 17 | ABU-17 | 1597 | 1957 | 137 | ABU-137 | 1717 | 2077 | 257 | ABU-257 |
| 1478 | 1838 | 18 | ABU-18 | 1598 | 1958 | 138 | ABU-138 | 1718 | 2078 | 258 | ABU-258 |
| 1479 | 1839 | 19 | ABU-19 | 1599 | 1959 | 139 | ABU-139 | 1719 | 2079 | 259 | ABU-259 |
| 1480 | 1840 | 20 | ABU-20 | 1600 | 1960 | 140 | ABU-140 | 1720 | 2080 | 260 | ABU-260 |
| 1481 | 1841 | 21 | ABU-21 | 1601 | 1961 | 141 | ABU-141 | 1721 | 2081 | 261 | ABU-261 |
| 1482 | 1842 | 22 | ABU-22 | 1602 | 1962 | 142 | ABU-142 | 1722 | 2082 | 262 | ABU-262 |
| 1483 | 1843 | 23 | ABU-23 | 1603 | 1963 | 143 | ABU-143 | 1723 | 2083 | 263 | ABU-263 |
| 1484 | 1844 | 24 | ABU-24 | 1604 | 1964 | 144 | ABU-144 | 1724 | 2084 | 264 | ABU-264 |
| 1485 | 1845 | 25 | ABU-25 | 1605 | 1965 | 145 | ABU-145 | 1725 | 2085 | 265 | ABU-265 |
| 1486 | 1846 | 26 | ABU-26 | 1606 | 1966 | 146 | ABU-146 | 1726 | 2086 | 266 | ABU-266 |
| 1487 | 1847 | 27 | ABU-27 | 1607 | 1967 | 147 | ABU-147 | 1727 | 2087 | 267 | ABU-267 |
| 1488 | 1848 | 28 | ABU-28 | 1608 | 1968 | 148 | ABU-148 | 1728 | 2088 | 268 | ABU-268 |
| 1489 | 1849 | 29 | ABU-29 | 1609 | 1969 | 149 | ABU-149 | 1729 | 2089 | 269 | ABU-269 |
| 1490 | 1850 | 30 | ABU-30 | 1610 | 1970 | 150 | ABU-150 | 1730 | 2090 | 270 | ABU-270 |
| 1491 | 1851 | 31 | ABU-31 | 1611 | 1971 | 151 | ABU-151 | 1731 | 2091 | 271 | ABU-271 |
| 1492 | 1852 | 32 | ABU-32 | 1612 | 1972 | 152 | ABU-152 | 1732 | 2092 | 272 | ABU-272 |
| 1493 | 1853 | 33 | ABU-33 | 1613 | 1973 | 153 | ABU-153 | 1733 | 2093 | 273 | ABU-273 |
| 1494 | 1854 | 34 | ABU-34 | 1614 | 1974 | 154 | ABU-154 | 1734 | 2094 | 274 | ABU-274 |
| 1495 | 1855 | 35 | ABU-35 | 1615 | 1975 | 155 | ABU-155 | 1735 | 2095 | 275 | ABU-275 |
| 1496 | 1856 | 36 | ABU-36 | 1616 | 1976 | 156 | ABU-156 | 1736 | 2096 | 276 | ABU-276 |
| 1497 | 1857 | 37 | ABU-37 | 1617 | 1977 | 157 | ABU-157 | 1737 | 2097 | 277 | ABU-277 |
| 1498 | 1858 | 38 | ABU-38 | 1618 | 1978 | 158 | ABU-158 | 1738 | 2098 | 278 | ABU-278 |
| 1499 | 1859 | 39 | ABU-39 | 1619 | 1979 | 159 | ABU-159 | 1739 | 2099 | 279 | ABU-279 |
| 1500 | 1860 | 40 | ABU-40 | 1620 | 1980 | 160 | ABU-160 | 1740 | 2100 | 280 | ABU-280 |
| 1501 | 1861 | 41 | ABU-41 | 1621 | 1981 | 161 | ABU-161 | 1741 | 2101 | 281 | ABU-281 |
| 1502 | 1862 | 42 | ABU-42 | 1622 | 1982 | 162 | ABU-162 | 1742 | 2102 | 282 | ABU-282 |
| 1503 | 1863 | 43 | ABU-43 | 1623 | 1983 | 163 | ABU-163 | 1743 | 2103 | 283 | ABU-283 |
| 1504 | 1864 | 44 | ABU-44 | 1624 | 1984 | 164 | ABU-164 | 1744 | 2104 | 284 | ABU-284 |
| 1505 | 1865 | 45 | ABU-45 | 1625 | 1985 | 165 | ABU-165 | 1745 | 2105 | 285 | ABU-285 |
| 1506 | 1866 | 46 | ABU-46 | 1626 | 1986 | 166 | ABU-166 | 1746 | 2106 | 286 | ABU-286 |
| 1507 | 1867 | 47 | ABU-47 | 1627 | 1987 | 167 | ABU-167 | 1747 | 2107 | 287 | ABU-287 |
| 1508 | 1868 | 48 | ABU-48 | 1628 | 1988 | 168 | ABU-168 | 1748 | 2108 | 288 | ABU-288 |
| 1509 | 1869 | 49 | ABU-49 | 1629 | 1989 | 169 | ABU-169 | 1749 | 2109 | 289 | ABU-289 |
| 1510 | 1870 | 50 | ABU-50 | 1630 | 1990 | 170 | ABU-170 | 1750 | 2110 | 290 | ABU-290 |
| 1511 | 1871 | 51 | ABU-51 | 1631 | 1991 | 171 | ABU-171 | 1751 | 2111 | 291 | ABU-291 |
| 1512 | 1872 | 52 | ABU-52 | 1632 | 1992 | 172 | ABU-172 | 1752 | 2112 | 292 | ABU-292 |
| 1513 | 1873 | 53 | ABU-53 | 1633 | 1993 | 173 | ABU-173 | 1753 | 2113 | 293 | ABU-293 |
| 1514 | 1874 | 54 | ABU-54 | 1634 | 1994 | 174 | ABU-174 | 1754 | 2114 | 294 | ABU-294 |
| 1515 | 1875 | 55 | ABU-55 | 1635 | 1995 | 175 | ABU-175 | 1755 | 2115 | 295 | ABU-295 |
| 1516 | 1876 | 56 | ABU-56 | 1636 | 1996 | 176 | ABU-176 | 1756 | 2116 | 296 | ABU-296 |
| 1517 | 1877 | 57 | ABU-57 | 1637 | 1997 | 177 | ABU-177 | 1757 | 2117 | 297 | ABU-297 |
| 1518 | 1878 | 58 | ABU-58 | 1638 | 1998 | 178 | ABU-178 | 1758 | 2118 | 298 | ABU-298 |
| 1519 | 1879 | 59 | ABU-59 | 1639 | 1999 | 179 | ABU-179 | 1759 | 2119 | 299 | ABU-299 |
| 1520 | 1880 | 60 | ABU-60 | 1640 | 2000 | 180 | ABU-180 | 1760 | 2120 | 300 | ABU-300 |
| 1521 | 1881 | 61 | ABU-61 | 1641 | 2001 | 181 | ABU-181 | 1761 | 2121 | 301 | ABU-301 |
| 1522 | 1882 | 62 | ABU-62 | 1642 | 2002 | 182 | ABU-182 | 1762 | 2122 | 302 | ABU-302 |
| 1523 | 1883 | 63 | ABU-63 | 1643 | 2003 | 183 | ABU-183 | 1763 | 2123 | 303 | ABU-303 |
| 1524 | 1884 | 64 | ABU-64 | 1644 | 2004 | 184 | ABU-184 | 1764 | 2124 | 304 | ABU-304 |
| 1525 | 1885 | 65 | ABU-65 | 1645 | 2005 | 185 | ABU-185 | 1765 | 2125 | 305 | ABU-305 |
| 1526 | 1886 | 66 | ABU-66 | 1646 | 2006 | 186 | ABU-186 | 1766 | 2126 | 306 | ABU-306 |
| 1527 | 1887 | 67 | ABU-67 | 1647 | 2007 | 187 | ABU-187 | 1767 | 2127 | 307 | ABU-307 |
| 1528 | 1888 | 68 | ABU-68 | 1648 | 2008 | 188 | ABU-188 | 1768 | 2128 | 308 | ABU-308 |
| 1529 | 1889 | 69 | ABU-69 | 1649 | 2009 | 189 | ABU-189 | 1769 | 2129 | 309 | ABU-309 |
| 1530 | 1890 | 70 | ABU-70 | 1650 | 2010 | 190 | ABU-190 | 1770 | 2130 | 310 | ABU-310 |
| 1531 | 1891 | 71 | ABU-71 | 1651 | 2011 | 191 | ABU-191 | 1771 | 2131 | 311 | ABU-311 |
| 1532 | 1892 | 72 | ABU-72 | 1652 | 2012 | 192 | ABU-192 | 1772 | 2132 | 312 | ABU-312 |
| 1533 | 1893 | 73 | ABU-73 | 1653 | 2013 | 193 | ABU-193 | 1773 | 2133 | 313 | ABU-313 |
| 1534 | 1894 | 74 | ABU-74 | 1654 | 2014 | 194 | ABU-194 | 1774 | 2134 | 314 | ABU-314 |
| 1535 | 1895 | 75 | ABU-75 | 1655 | 2015 | 195 | ABU-195 | 1775 | 2135 | 315 | ABU-315 |
| 1536 | 1896 | 76 | ABU-76 | 1656 | 2016 | 196 | ABU-196 | 1776 | 2136 | 316 | ABU-316 |
| 1537 | 1897 | 77 | ABU-77 | 1657 | 2017 | 197 | ABU-197 | 1777 | 2137 | 317 | ABU-317 |
| 1538 | 1898 | 78 | ABU-78 | 1658 | 2018 | 198 | ABU-198 | 1778 | 2138 | 318 | ABU-318 |
| 1539 | 1899 | 79 | ABU-79 | 1659 | 2019 | 199 | ABU-199 | 1779 | 2139 | 319 | ABU-319 |
| 1540 | 1900 | 80 | ABU-80 | 1660 | 2020 | 200 | ABU-200 | 1780 | 2140 | 320 | ABU-320 |
| 1541 | 1901 | 81 | ABU-81 | 1661 | 2021 | 201 | ABU-201 | 1781 | 2141 | 321 | ABU-321 |
| 1542 | 1902 | 82 | ABU-82 | 1662 | 2022 | 202 | ABU-202 | 1782 | 2142 | 322 | ABU-322 |
| 1543 | 1903 | 83 | ABU-83 | 1663 | 2023 | 203 | ABU-203 | 1783 | 2143 | 323 | ABU-323 |
| 1544 | 1904 | 84 | ABU-84 | 1664 | 2024 | 204 | ABU-204 | 1784 | 2144 | 324 | ABU-324 |
| 1545 | 1905 | 85 | ABU-85 | 1665 | 2025 | 205 | ABU-205 | 1785 | 2145 | 325 | ABU-325 |
| 1546 | 1906 | 86 | ABU-86 | 1666 | 2026 | 206 | ABU-206 | 1786 | 2146 | 326 | ABU-326 |
| 1547 | 1907 | 87 | ABU-87 | 1667 | 2027 | 207 | ABU-207 | 1787 | 2147 | 327 | ABU-327 |
| 1548 | 1908 | 88 | ABU-88 | 1668 | 2028 | 208 | ABU-208 | 1788 | 2148 | 328 | ABU-328 |
| 1549 | 1909 | 89 | ABU-89 | 1669 | 2029 | 209 | ABU-209 | 1789 | 2149 | 329 | ABU-329 |
| 1550 | 1910 | 90 | ABU-90 | 1670 | 2030 | 210 | ABU-210 | 1790 | 2150 | 330 | ABU-330 |
| 1551 | 1911 | 91 | ABU-91 | 1671 | 2031 | 211 | ABU-211 | 1791 | 2151 | 331 | ABU-331 |
| 1552 | 1912 | 92 | ABU-92 | 1672 | 2032 | 212 | ABU-212 | 1792 | 2152 | 332 | ABU-332 |
| 1553 | 1913 | 93 | ABU-93 | 1673 | 2033 | 213 | ABU-213 | 1793 | 2153 | 333 | ABU-333 |
| 1554 | 1914 | 94 | ABU-94 | 1674 | 2034 | 214 | ABU-214 | 1794 | 2154 | 334 | ABU-334 |
| 1555 | 1915 | 95 | ABU-95 | 1675 | 2035 | 215 | ABU-215 | 1795 | 2155 | 335 | ABU-335 |
| 1556 | 1916 | 96 | ABU-96 | 1676 | 2036 | 216 | ABU-216 | 1796 | 2156 | 336 | ABU-336 |
| 1557 | 1917 | 97 | ABU-97 | 1677 | 2037 | 217 | ABU-217 | 1797 | 2157 | 337 | ABU-337 |
| 1558 | 1918 | 98 | ABU-98 | 1678 | 2038 | 218 | ABU-218 | 1798 | 2158 | 338 | ABU-338 |
| 1559 | 1919 | 99 | ABU-99 | 1679 | 2039 | 219 | ABU-219 | 1799 | 2159 | 339 | ABU-339 |
| 1560 | 1920 | 100 | ABU-100 | 1680 | 2040 | 220 | ABU-220 | 1800 | 2160 | 340 | ABU-340 |
| 1561 | 1921 | 101 | ABU-101 | 1681 | 2041 | 221 | ABU-221 | 1801 | 2161 | 341 | ABU-341 |
| 1562 | 1922 | 102 | ABU-102 | 1682 | 2042 | 222 | ABU-222 | 1802 | 2162 | 342 | ABU-342 |
| 1563 | 1923 | 103 | ABU-103 | 1683 | 2043 | 223 | ABU-223 | 1803 | 2163 | 343 | ABU-343 |
| 1564 | 1924 | 104 | ABU-104 | 1684 | 2044 | 224 | ABU-224 | 1804 | 2164 | 344 | ABU-344 |
| 1565 | 1925 | 105 | ABU-105 | 1685 | 2045 | 225 | ABU-225 | 1805 | 2165 | 345 | ABU-345 |
| 1566 | 1926 | 106 | ABU-106 | 1686 | 2046 | 226 | ABU-226 | 1806 | 2166 | 346 | ABU-346 |
| 1567 | 1927 | 107 | ABU-107 | 1687 | 2047 | 227 | ABU-227 | 1807 | 2167 | 347 | ABU-347 |
| 1568 | 1928 | 108 | ABU-108 | 1688 | 2048 | 228 | ABU-228 | 1808 | 2168 | 348 | ABU-348 |
| 1569 | 1929 | 109 | ABU-109 | 1689 | 2049 | 229 | ABU-229 | 1809 | 2169 | 349 | ABU-349 |
| 1570 | 1930 | 110 | ABU-110 | 1690 | 2050 | 230 | ABU-230 | 1810 | 2170 | 350 | ABU-350 |
| 1571 | 1931 | 111 | ABU-111 | 1691 | 2051 | 231 | ABU-231 | 1811 | 2171 | 351 | ABU-351 |
| 1572 | 1932 | 112 | ABU-112 | 1692 | 2052 | 232 | ABU-232 | 1812 | 2172 | 352 | ABU-352 |
| 1573 | 1933 | 113 | ABU-113 | 1693 | 2053 | 233 | ABU-233 | 1813 | 2173 | 353 | ABU-353 |
| 1574 | 1934 | 114 | ABU-114 | 1694 | 2054 | 234 | ABU-234 | 1814 | 2174 | 354 | ABU-354 |
| 1575 | 1935 | 115 | ABU-115 | 1695 | 2055 | 235 | ABU-235 | 1815 | 2175 | 355 | ABU-355 |
| 1576 | 1936 | 116 | ABU-116 | 1696 | 2056 | 236 | ABU-236 | 1816 | 2176 | 356 | ABU-356 |
| 1577 | 1937 | 117 | ABU-117 | 1697 | 2057 | 237 | ABU-237 | 1817 | 2177 | 357 | ABU-357 |
| 1578 | 1938 | 118 | ABU-118 | 1698 | 2058 | 238 | ABU-238 | 1818 | 2178 | 358 | ABU-358 |
| 1579 | 1939 | 119 | ABU-119 | 1699 | 2059 | 239 | ABU-239 | 1819 | 2179 | 359 | ABU-359 |
| 1580 | 1940 | 120 | ABU-120 | 1700 | 2060 | 240 | ABU-240 | 1820 | 2180 | 360 | ABU-360 |
| 2901 | 2936 | 2971 | ABU-361 | 2913 | 2948 | 2983 | ABU-373 | 2925 | 2960 | 2995 | ABU-385 |
| 2902 | 2937 | 2972 | ABU-362 | 2914 | 2949 | 2984 | ABU-374 | 2926 | 2961 | 2996 | ABU-386 |
| 2903 | 2938 | 2973 | ABU-363 | 2915 | 2950 | 2985 | ABU-375 | 2927 | 2962 | 2997 | ABU-387 |
| 2904 | 2939 | 2974 | ABU-364 | 2916 | 2951 | 2986 | ABU-376 | 2928 | 2963 | 2998 | ABU-388 |
| 2905 | 2940 | 2975 | ABU-365 | 2917 | 2952 | 2987 | ABU-377 | 2929 | 2964 | 2999 | ABU-389 |
| 2906 | 2941 | 2976 | ABU-366 | 2918 | 2953 | 2988 | ABU-378 | 2930 | 2965 | 3000 | ABU-390 |
| 2907 | 2942 | 2977 | ABU-367 | 2919 | 2954 | 2989 | ABU-379 | 2931 | 2966 | 3001 | ABU-391 |
| 2908 | 2943 | 2978 | ABU-368 | 2920 | 2955 | 2990 | ABU-380 | 2932 | 2967 | 3002 | ABU-392 |
| 2909 | 2944 | 2979 | ABU-369 | 2921 | 2956 | 2991 | ABU-381 | 2933 | 2968 | 3003 | ABU-393 |
| 2910 | 2945 | 2980 | ABU-370 | 2922 | 2957 | 2992 | ABU-382 | 2934 | 2969 | 3004 | ABU-394 |
| 2911 | 2946 | 2981 | ABU-371 | 2923 | 2958 | 2993 | ABU-383 | 2935 | 2970 | 3005 | ABU-395 |
| 2912 | 2947 | 2982 | ABU-372 | 2924 | 2959 | 2994 | ABU-384 | | | | |

The VL of the antigen binding unit of the present invention can comprise a sequence selected from combinations of CDR1, CDR2, and CDR3 as following:

| LCDR1 | LCDR2 | LCDR3 | ABU No. | LCDR1 | LCDR2 | LCDR3 | ABU No. | LCDR1 | LCDR2 | LCUR3 | ABU No. |
|---|---|---|---|---|---|---|---|---|---|---|---|
| 2181 | 2541 | 361 | ABU-1 | 2301 | 2661 | 481 | ABU-121 | 2421 | 2781 | 601 | ABU-241 |
| 2182 | 2542 | 362 | ABU-2 | 2302 | 2662 | 482 | ABU-122 | 2422 | 2782 | 602 | ABU-242 |
| 2183 | 2543 | 363 | ABU-3 | 2303 | 2663 | 483 | ABU-123 | 2423 | 2783 | 603 | ABU-243 |
| 2184 | 2544 | 364 | ABU-4 | 2304 | 2664 | 484 | ABU-124 | 2424 | 2784 | 604 | ABU-244 |
| 2185 | 2545 | 365 | ABU-5 | 2305 | 2665 | 485 | ABU-125 | 2425 | 2785 | 605 | ABU-245 |
| 2186 | 2546 | 366 | ABU-6 | 2306 | 2666 | 486 | ABU-126 | 2426 | 2786 | 606 | ABU-246 |
| 2187 | 2547 | 367 | ABU-7 | 2307 | 2667 | 487 | ABU-127 | 2427 | 2787 | 607 | ABU-247 |
| 2188 | 2548 | 368 | ABU-8 | 2308 | 2668 | 488 | ABU-128 | 2428 | 2788 | 608 | ABU-248 |
| 2189 | 2549 | 369 | ABU-9 | 2309 | 2669 | 489 | ABU-129 | 2429 | 2789 | 609 | ABU-249 |
| 2190 | 2550 | 370 | ABU-10 | 2310 | 2670 | 490 | ABU-130 | 2430 | 2790 | 610 | ABU-250 |
| 2191 | 2551 | 371 | ABU-11 | 2311 | 2671 | 491 | ABU-131 | 2431 | 2791 | 611 | ABU-251 |
| 2192 | 2552 | 372 | ABU-12 | 2312 | 2672 | 492 | ABU-132 | 2432 | 2792 | 612 | ABU-252 |
| 2193 | 2553 | 373 | ABU-13 | 2313 | 2673 | 493 | ABU-133 | 2433 | 2793 | 613 | ABU-253 |
| 2194 | 2554 | 374 | ABU-14 | 2314 | 2674 | 494 | ABU-134 | 2434 | 2794 | 614 | ABU-254 |
| 2195 | 2555 | 375 | ABU-15 | 2315 | 2675 | 495 | ABU-135 | 2435 | 2795 | 615 | ABU-255 |
| 2196 | 2556 | 376 | ABU-16 | 2316 | 2676 | 496 | ABU-136 | 2436 | 2796 | 616 | ABU-256 |
| 2197 | 2557 | 377 | ABU-17 | 2317 | 2677 | 497 | ABU-137 | 2437 | 2797 | 617 | ABU-257 |
| 2198 | 2558 | 378 | ABU-18 | 2318 | 2678 | 498 | ABU-138 | 2438 | 2798 | 618 | ABU-258 |
| 2199 | 2559 | 379 | ABU-19 | 2319 | 2679 | 499 | ABU-139 | 2439 | 2799 | 619 | ABU-259 |
| 2200 | 2560 | 380 | ABU-20 | 2320 | 2680 | 500 | ABU-140 | 2440 | 2800 | 620 | ABU-260 |
| 2201 | 2561 | 381 | ABU-21 | 2321 | 2681 | 501 | ABU-141 | 2441 | 2801 | 621 | ABU-261 |
| 2202 | 2562 | 382 | ABU-22 | 2322 | 2682 | 502 | ABU-142 | 2442 | 2802 | 622 | ABU-262 |
| 2203 | 2563 | 383 | ABU-23 | 2323 | 2683 | 503 | ABU-143 | 2443 | 2803 | 623 | ABU-263 |
| 2204 | 2564 | 384 | ABU-24 | 2324 | 2684 | 504 | ABU-144 | 2444 | 2804 | 624 | ABU-264 |
| 2205 | 2565 | 385 | ABU-25 | 2325 | 2685 | 505 | ABU-145 | 2445 | 2805 | 625 | ABU-265 |
| 2206 | 2566 | 386 | ABU-26 | 2326 | 2686 | 506 | ABU-146 | 2446 | 2806 | 626 | ABU-266 |
| 2207 | 2567 | 387 | ABU-27 | 2327 | 2687 | 507 | ABU-147 | 2447 | 2807 | 627 | ABU-267 |
| 2208 | 2568 | 388 | ABU-28 | 2328 | 2688 | 508 | ABU-148 | 2448 | 2808 | 628 | ABU-268 |
| 2209 | 2569 | 389 | ABU-29 | 2329 | 2689 | 509 | ABU-149 | 2449 | 2809 | 629 | ABU-269 |
| 2210 | 2570 | 390 | ABU-30 | 2330 | 2690 | 510 | ABU-150 | 2450 | 2810 | 630 | ABU-270 |
| 2211 | 2571 | 391 | ABU-31 | 2331 | 2691 | 511 | ABU-151 | 2451 | 2811 | 631 | ABU-271 |
| 2212 | 2572 | 392 | ABU-32 | 2332 | 2692 | 512 | ABU-152 | 2452 | 2812 | 632 | ABU-272 |
| 2213 | 2573 | 393 | ABU-33 | 2333 | 2693 | 513 | ABU-153 | 2453 | 2813 | 633 | ABU-273 |
| 2214 | 2574 | 394 | ABU-34 | 2334 | 2694 | 514 | ABU-154 | 2454 | 2814 | 634 | ABU-274 |
| 2215 | 2575 | 395 | ABU-35 | 2335 | 2695 | 515 | ABU-155 | 2455 | 2815 | 635 | ABU-275 |
| 2216 | 2576 | 396 | ABU-36 | 2336 | 2696 | 516 | ABU-156 | 2456 | 2816 | 636 | ABU-276 |
| 2217 | 2577 | 397 | ABU-37 | 2337 | 2697 | 517 | ABU-157 | 2457 | 2817 | 637 | ABU-277 |
| 2218 | 2578 | 398 | ABU-38 | 2338 | 2698 | 518 | ABU-158 | 2458 | 2818 | 638 | ABU-278 |
| 2219 | 2579 | 399 | ABU-39 | 2339 | 2699 | 519 | ABU-159 | 2459 | 2819 | 639 | ABU-279 |
| 2220 | 2580 | 400 | ABU-40 | 2340 | 2700 | 520 | ABU-160 | 2460 | 2820 | 640 | ABU-280 |
| 2221 | 2581 | 401 | ABU-41 | 2341 | 2701 | 521 | ABU-161 | 2461 | 2821 | 641 | ABU-281 |
| 2222 | 2582 | 402 | ABU-42 | 2342 | 2702 | 522 | ABU-162 | 2462 | 2822 | 642 | ABU-282 |
| 2223 | 2583 | 403 | ABU-43 | 2343 | 2703 | 523 | ABU-163 | 2463 | 2823 | 643 | ABU-283 |
| 2224 | 2584 | 404 | ABU-44 | 2344 | 2704 | 524 | ABU-164 | 2464 | 2824 | 644 | ABU-284 |
| 2225 | 2585 | 405 | ABU-45 | 2345 | 2705 | 525 | ABU-165 | 2465 | 2825 | 645 | ABU-285 |
| 2226 | 2586 | 406 | ABU-46 | 2346 | 2706 | 526 | ABU-166 | 2466 | 2826 | 646 | ABU-286 |
| 2227 | 2587 | 407 | ABU-47 | 2347 | 2707 | 527 | ABU-167 | 2467 | 2827 | 647 | ABU-287 |
| 2228 | 2588 | 408 | ABU-48 | 2348 | 2708 | 528 | ABU-168 | 2468 | 2828 | 648 | ABU-288 |
| 2229 | 2589 | 409 | ABU-49 | 2349 | 2709 | 529 | ABU-169 | 2469 | 2829 | 649 | ABU-289 |
| 2230 | 2590 | 410 | ABU-50 | 2350 | 2710 | 530 | ABU-170 | 2470 | 2830 | 650 | ABU-290 |
| 2231 | 2591 | 411 | ABU-51 | 2351 | 2711 | 531 | ABU-171 | 2471 | 2831 | 651 | ABU-291 |
| 2232 | 2592 | 412 | ABU-52 | 2352 | 2712 | 532 | ABU-172 | 2472 | 2832 | 652 | ABU-292 |
| 2233 | 2593 | 413 | ABU-53 | 2353 | 2713 | 533 | ABU-173 | 2473 | 2833 | 653 | ABU-293 |
| 2234 | 2594 | 414 | ABU-54 | 2354 | 2714 | 534 | ABU-174 | 2474 | 2834 | 654 | ABU-294 |
| 2235 | 2595 | 415 | ABU-55 | 2355 | 2715 | 535 | ABU-175 | 2475 | 2835 | 655 | ABU-295 |
| 2236 | 2596 | 416 | ABU-56 | 2356 | 2716 | 536 | ABU-176 | 2476 | 2836 | 656 | ABU-296 |
| 2237 | 2597 | 417 | ABU-57 | 2357 | 2717 | 537 | ABU-177 | 2477 | 2837 | 657 | ABU-297 |
| 2238 | 2598 | 418 | ABU-58 | 2358 | 2718 | 538 | ABU-178 | 2478 | 2838 | 658 | ABU-298 |
| 2239 | 2599 | 419 | ABU-59 | 2359 | 2719 | 539 | ABU-179 | 2479 | 2839 | 659 | ABU-299 |
| 2240 | 2600 | 420 | ABU-60 | 2360 | 2720 | 540 | ABU-180 | 2480 | 2840 | 660 | ABU-300 |
| 2241 | 2601 | 421 | ABU-61 | 2361 | 2721 | 541 | ABU-181 | 2481 | 2841 | 661 | ABU-301 |
| 2242 | 2602 | 422 | ABU-62 | 2362 | 2722 | 542 | ABU-182 | 2482 | 2842 | 662 | ABU-302 |
| 2243 | 2603 | 423 | ABU-63 | 2363 | 2723 | 543 | ABU-183 | 2483 | 2843 | 663 | ABU-303 |
| 2244 | 2604 | 424 | ABU-64 | 2364 | 2724 | 544 | ABU-184 | 2484 | 2844 | 664 | ABU-304 |
| 2245 | 2605 | 425 | ABU-65 | 2365 | 2725 | 545 | ABU-185 | 2485 | 2845 | 665 | ABU-305 |
| 2246 | 2606 | 426 | ABU-66 | 2366 | 2726 | 546 | ABU-186 | 2486 | 2846 | 666 | ABU-306 |
| 2247 | 2607 | 427 | ABU-67 | 2367 | 2727 | 547 | ABU-187 | 2487 | 2847 | 667 | ABU-307 |
| 2248 | 2608 | 428 | ABU-68 | 2368 | 2728 | 548 | ABU-188 | 2488 | 2848 | 668 | ABU-308 |
| 2249 | 2609 | 429 | ABU-69 | 2369 | 2729 | 549 | ABU-189 | 2489 | 2849 | 669 | ABU-309 |
| 2250 | 2610 | 430 | ABU-70 | 2370 | 2730 | 550 | ABU-190 | 2490 | 2850 | 670 | ABU-310 |
| 2251 | 2611 | 431 | ABU-71 | 2371 | 2731 | 551 | ABU-191 | 2491 | 2851 | 671 | ABU-311 |
| 2252 | 2612 | 432 | ABU-72 | 2372 | 2732 | 552 | ABU-192 | 2492 | 2852 | 672 | ABU-312 |
| 2253 | 2613 | 433 | ABU-73 | 2373 | 2733 | 553 | ABU-193 | 2493 | 2853 | 673 | ABU-313 |
| 2254 | 2614 | 434 | ABU-74 | 2374 | 2734 | 554 | ABU-194 | 2494 | 2854 | 674 | ABU-314 |
| 2255 | 2615 | 435 | ABU-75 | 2375 | 2735 | 555 | ABU-195 | 2495 | 2855 | 675 | ABU-315 |
| 2256 | 2616 | 436 | ABU-76 | 2376 | 2736 | 556 | ABU-196 | 2496 | 2856 | 676 | ABU-316 |
| 2257 | 2617 | 437 | ABU-77 | 2377 | 2737 | 557 | ABU-197 | 2497 | 2857 | 677 | ABU-317 |
| 2258 | 2618 | 438 | ABU-78 | 2378 | 2738 | 558 | ABU-198 | 2498 | 2858 | 678 | ABU-318 |
| 2259 | 2619 | 439 | ABU-79 | 2379 | 2739 | 559 | ABU-199 | 2499 | 2859 | 679 | ABU-319 |
| 2260 | 2620 | 440 | ABU-80 | 2380 | 2740 | 560 | ABU-200 | 2500 | 2860 | 680 | ABU-320 |
| 2261 | 2621 | 441 | ABU-81 | 2381 | 2741 | 561 | ABU-201 | 2501 | 2861 | 681 | ABU-321 |
| 2262 | 2622 | 442 | ABU-82 | 2382 | 2742 | 562 | ABU-202 | 2502 | 2862 | 682 | ABU-322 |
| 2263 | 2623 | 443 | ABU-83 | 2383 | 2743 | 563 | ABU-203 | 2503 | 2863 | 683 | ABU-323 |
| 2264 | 2624 | 444 | ABU-84 | 2384 | 2744 | 564 | ABU-204 | 2504 | 2864 | 684 | ABU-324 |
| 2265 | 2625 | 445 | ABU-85 | 2385 | 2745 | 565 | ABU-205 | 2505 | 2865 | 685 | ABU-325 |
| 2266 | 2626 | 446 | ABU-86 | 2386 | 2746 | 566 | ABU-206 | 2506 | 2866 | 686 | ABU-326 |
| 2267 | 2627 | 447 | ABU-87 | 2387 | 2747 | 567 | ABU-207 | 2507 | 2867 | 687 | ABU-327 |
| 2268 | 2628 | 448 | ABU-88 | 2388 | 2748 | 568 | ABU-208 | 2508 | 2868 | 688 | ABU-328 |
| 2269 | 2629 | 449 | ABU-89 | 2389 | 2749 | 569 | ABU-209 | 2509 | 2869 | 689 | ABU-329 |
| 2270 | 2630 | 450 | ABU-90 | 2390 | 2750 | 570 | ABU-210 | 2510 | 2870 | 690 | ABU-330 |
| 2271 | 2631 | 451 | ABU-91 | 2391 | 2751 | 571 | ABU-211 | 2511 | 2871 | 691 | ABU-331 |
| 2272 | 2632 | 452 | ABU-92 | 2392 | 2752 | 572 | ABU-212 | 2512 | 2872 | 692 | ABU-332 |
| 2273 | 2633 | 453 | ABU-93 | 2393 | 2753 | 573 | ABU-213 | 2513 | 2873 | 693 | ABU-333 |
| 2274 | 2634 | 454 | ABU-94 | 2394 | 2754 | 574 | ABU-214 | 2514 | 2874 | 694 | ABU-334 |
| 2275 | 2635 | 455 | ABU-95 | 2395 | 2755 | 575 | ABU-215 | 2515 | 2875 | 695 | ABU-335 |
| 2276 | 2636 | 456 | ABU-96 | 2396 | 2756 | 576 | ABU-216 | 2516 | 2876 | 696 | ABU-336 |
| 2277 | 2637 | 457 | ABU-97 | 2397 | 2757 | 577 | ABU-217 | 2517 | 2877 | 697 | ABU-337 |
| 2278 | 2638 | 458 | ABU-98 | 2398 | 2758 | 578 | ABU-218 | 2518 | 2878 | 698 | ABU-338 |
| 2279 | 2639 | 459 | ABU-99 | 2399 | 2759 | 579 | ABU-219 | 2519 | 2879 | 699 | ABU-339 |
| 2280 | 2640 | 460 | ABU-100 | 2400 | 2760 | 580 | ABU-220 | 2520 | 2880 | 700 | ABU-340 |
| 2281 | 2641 | 461 | ABU-101 | 2401 | 2761 | 581 | ABU-221 | 2521 | 2881 | 701 | ABU-341 |
| 2282 | 2642 | 462 | ABU-102 | 2402 | 2762 | 582 | ABU-222 | 2522 | 2882 | 702 | ABU-342 |
| 2283 | 2643 | 463 | ABU-103 | 2403 | 2763 | 583 | ABU-223 | 2523 | 2883 | 703 | ABU-343 |
| 2284 | 2644 | 464 | ABU-104 | 2404 | 2764 | 584 | ABU-224 | 2524 | 2884 | 704 | ABU-344 |
| 2285 | 2645 | 465 | ABU-105 | 2405 | 2765 | 585 | ABU-225 | 2525 | 2885 | 705 | ABU-345 |
| 2286 | 2646 | 466 | ABU-106 | 2406 | 2766 | 586 | ABU-226 | 2526 | 2886 | 706 | ABU-346 |
| 2287 | 2647 | 467 | ABU-107 | 2407 | 2767 | 587 | ABU-227 | 2527 | 2887 | 707 | ABU-347 |
| 2288 | 2648 | 468 | ABU-108 | 2408 | 2768 | 588 | ABU-228 | 2528 | 2888 | 708 | ABU-348 |
| 2289 | 2649 | 469 | ABU-109 | 2409 | 2769 | 589 | ABU-229 | 2529 | 2889 | 709 | ABU-349 |
| 2290 | 2650 | 470 | ABU-110 | 2410 | 2770 | 590 | ABU-230 | 2530 | 2890 | 710 | ABU-350 |
| 2291 | 2651 | 471 | ABU-111 | 2411 | 2771 | 591 | ABU-231 | 2531 | 2891 | 711 | ABU-351 |
| 2292 | 2652 | 472 | ABU-112 | 2412 | 2772 | 592 | ABU-232 | 2532 | 2892 | 712 | ABU-352 |
| 2293 | 2653 | 473 | ABU-113 | 2413 | 2773 | 593 | ABU-233 | 2533 | 2893 | 713 | ABU-353 |
| 2294 | 2654 | 474 | ABU-114 | 2414 | 2774 | 594 | ABU-234 | 2534 | 2894 | 714 | ABU-354 |
| 2295 | 2655 | 475 | ABU-115 | 2415 | 2775 | 595 | ABU-235 | 2535 | 2895 | 715 | ABU-355 |
| 2296 | 2656 | 476 | ABU-116 | 2416 | 2776 | 596 | ABU-236 | 2536 | 2896 | 716 | ABU-356 |
| 2297 | 2657 | 477 | ABU-117 | 2417 | 2777 | 597 | ABU-237 | 2537 | 2897 | 717 | ABU-357 |
| 2298 | 2658 | 478 | ABU-118 | 2418 | 2778 | 598 | ABU-238 | 2538 | 2898 | 718 | ABU-358 |
| 2299 | 2659 | 479 | ABU-119 | 2419 | 2779 | 599 | ABU-239 | 2539 | 2899 | 719 | ABU-359 |
| 2300 | 2660 | 480 | ABU-120 | 2420 | 2780 | 600 | ABU-240 | 2540 | 2900 | 720 | ABU-360 |
| 3006 | 3041 | 3076 | ABU-361 | 3018 | 3053 | 3088 | ABU-373 | 3030 | 3065 | 3100 | ABU-385 |
| 3007 | 3042 | 3077 | ABU-362 | 3019 | 3054 | 3089 | ABU-374 | 3031 | 3066 | 3101 | ABU-386 |
| 3008 | 3043 | 3078 | ABU-363 | 3020 | 3055 | 3090 | ABU-375 | 3032 | 3067 | 3102 | ABU-387 |
| 3009 | 3044 | 3079 | ABU-364 | 3021 | 3056 | 3091 | ABU-376 | 3033 | 3068 | 3103 | ABU-388 |
| 3010 | 3045 | 3080 | ABU-365 | 3022 | 3057 | 3092 | ABU-377 | 3034 | 3069 | 3104 | ABU-389 |
| 3011 | 3046 | 3081 | ABU-366 | 3023 | 3058 | 3093 | ABU-378 | 3035 | 3070 | 3105 | ABU-390 |
| 3012 | 3047 | 3082 | ABU-367 | 3024 | 3059 | 3094 | ABU-379 | 3036 | 3071 | 3106 | ABU-391 |
| 3013 | 3048 | 3083 | ABU-368 | 3025 | 3060 | 3095 | ABU-380 | 3037 | 3072 | 3107 | ABU-392 |
| 3014 | 3049 | 3084 | ABU-369 | 3026 | 3061 | 3096 | ABU-381 | 3038 | 3073 | 3108 | ABU-393 |
| 3015 | 3050 | 3085 | ABU-370 | 3027 | 3062 | 3097 | ABU-382 | 3039 | 3074 | 3109 | ABU-394 |
| 3016 | 3051 | 3086 | ABU-371 | 3028 | 3063 | 3098 | ABU-383 | 3040 | 3075 | 3110 | ABU-395 |
| 3017 | 3052 | 3087 | ABU-372 | 3029 | 3064 | 3099 | ABU-384 | | | | |

In the antigen binding unit of the present invention, the VH can comprise a sequence selected from combinations of CDR1, CDR2, and CDR3 as following:

| HCDR1 | HCDR2 | HCDR3 | ABU No. | HCDR1 | HCDR2 | HCDR3 | ABU No. | HCDR1 | HCDR2 | HCDR3 | ABU No. |
|---|---|---|---|---|---|---|---|---|---|---|---|
| 1461 | 1821 | 1 | ABU-1 | 1581 | 1941 | 121 | ABU-121 | 1701 | 2061 | 241 | ABU-241 |
| 1462 | 1822 | 2 | ABU-2 | 1582 | 1942 | 122 | ABU-122 | 1702 | 2062 | 242 | ABU-242 |
| 1463 | 1823 | 3 | ABU-3 | 1583 | 1943 | 123 | ABU-123 | 1703 | 2063 | 243 | ABU-243 |
| 1464 | 1824 | 4 | ABU-4 | 1584 | 1944 | 124 | ABU-124 | 1704 | 2064 | 244 | ABU-244 |
| 1465 | 1825 | 5 | ABU-5 | 1585 | 1945 | 125 | ABU-125 | 1705 | 2065 | 245 | ABU-245 |
| 1466 | 1826 | 6 | ABU-6 | 1586 | 1946 | 126 | ABU-126 | 1706 | 2066 | 246 | ABU-246 |
| 1467 | 1827 | 7 | ABU-7 | 1587 | 1947 | 127 | ABU-127 | 1707 | 2067 | 247 | ABU-247 |
| 1468 | 1828 | 8 | ABU-8 | 1588 | 1948 | 128 | ABU-128 | 1708 | 2068 | 248 | ABU-248 |
| 1469 | 1829 | 9 | ABU-9 | 1589 | 1949 | 129 | ABU-129 | 1709 | 2069 | 249 | ABU-249 |
| 1470 | 1830 | 10 | ABU-10 | 1590 | 1950 | 130 | ABU-130 | 1710 | 2070 | 250 | ABU-250 |
| 1471 | 1831 | 11 | ABU-11 | 1591 | 1951 | 131 | ABU-131 | 1711 | 2071 | 251 | ABU-251 |
| 1472 | 1832 | 12 | ABU-12 | 1592 | 1952 | 132 | ABU-132 | 1712 | 2072 | 252 | ABU-252 |
| 1473 | 1833 | 13 | ABU-13 | 1593 | 1953 | 133 | ABU-133 | 1713 | 2073 | 253 | ABU-253 |
| 1474 | 1834 | 14 | ABU-14 | 1594 | 1954 | 134 | ABU-134 | 1714 | 2074 | 254 | ABU-254 |
| 1475 | 1835 | 15 | ABU-15 | 1595 | 1955 | 135 | ABU-135 | 1715 | 2075 | 255 | ABU-255 |
| 1476 | 1836 | 16 | ABU-16 | 1596 | 1956 | 136 | ABU-136 | 1716 | 2076 | 256 | ABU-256 |
| 1477 | 1837 | 17 | ABU-17 | 1597 | 1957 | 137 | ABU-137 | 1717 | 2077 | 257 | ABU-257 |
| 1478 | 1838 | 18 | ABU-18 | 1598 | 1958 | 138 | ABU-138 | 1718 | 2078 | 258 | ABU-258 |
| 1479 | 1839 | 19 | ABU-19 | 1599 | 1959 | 139 | ABU-139 | 1719 | 2079 | 259 | ABU-259 |
| 1480 | 1840 | 20 | ABU-20 | 1600 | 1960 | 140 | ABU-140 | 1720 | 2080 | 260 | ABU-260 |
| 1481 | 1841 | 21 | ABU-21 | 1601 | 1961 | 141 | ABU-141 | 1721 | 2081 | 261 | ABU-261 |
| 1482 | 1842 | 22 | ABU-22 | 1602 | 1962 | 142 | ABU-142 | 1722 | 2082 | 262 | ABU-262 |
| 1483 | 1843 | 23 | ABU-23 | 1603 | 1963 | 143 | ABU-143 | 1723 | 2083 | 263 | ABU-263 |
| 1484 | 1844 | 24 | ABU-24 | 1604 | 1964 | 144 | ABU-144 | 1724 | 2084 | 264 | ABU-264 |
| 1485 | 1845 | 25 | ABU-25 | 1605 | 1965 | 145 | ABU-145 | 1725 | 2085 | 265 | ABU-265 |
| 1486 | 1846 | 26 | ABU-26 | 1606 | 1966 | 146 | ABU-146 | 1726 | 2086 | 266 | ABU-266 |
| 1487 | 1847 | 27 | ABU-27 | 1607 | 1967 | 147 | ABU-147 | 1727 | 2087 | 267 | ABU-267 |
| 1488 | 1848 | 28 | ABU-28 | 1608 | 1968 | 148 | ABU-148 | 1728 | 2088 | 268 | ABU-268 |
| 1489 | 1849 | 29 | ABU-29 | 1609 | 1969 | 149 | ABU-149 | 1729 | 2089 | 269 | ABU-269 |
| 1490 | 1850 | 30 | ABU-30 | 1610 | 1970 | 150 | ABU-150 | 1730 | 2090 | 270 | ABU-270 |
| 1491 | 1851 | 31 | ABU-31 | 1611 | 1971 | 151 | ABU-151 | 1731 | 2091 | 271 | ABU-271 |
| 1492 | 1852 | 32 | ABU-32 | 1612 | 1972 | 152 | ABU-152 | 1732 | 2092 | 272 | ABU-272 |
| 1493 | 1853 | 33 | ABU-33 | 1613 | 1973 | 153 | ABU-153 | 1733 | 2093 | 273 | ABU-273 |
| 1494 | 1854 | 34 | ABU-34 | 1614 | 1974 | 154 | ABU-154 | 1734 | 2094 | 274 | ABU-274 |
| 1495 | 1855 | 35 | ABU-35 | 1615 | 1975 | 155 | ABU-155 | 1735 | 2095 | 275 | ABU-275 |
| 1496 | 1856 | 36 | ABU-36 | 1616 | 1976 | 156 | ABU-156 | 1736 | 2096 | 276 | ABU-276 |
| 1497 | 1857 | 37 | ABU-37 | 1617 | 1977 | 157 | ABU-157 | 1737 | 2097 | 277 | ABU-277 |
| 1498 | 1858 | 38 | ABU-38 | 1618 | 1978 | 158 | ABU-158 | 1738 | 2098 | 278 | ABU-278 |
| 1499 | 1859 | 39 | ABU-39 | 1619 | 1979 | 159 | ABU-159 | 1739 | 2099 | 279 | ABU-279 |
| 1500 | 1860 | 40 | ABU-40 | 1620 | 1980 | 160 | ABU-160 | 1740 | 2100 | 280 | ABU-280 |
| 1501 | 1861 | 41 | ABU-41 | 1621 | 1981 | 161 | ABU-161 | 1741 | 2101 | 281 | ABU-281 |
| 1502 | 1862 | 42 | ABU-42 | 1622 | 1982 | 162 | ABU-162 | 1742 | 2102 | 282 | ABU-282 |
| 1503 | 1863 | 43 | ABU-43 | 1623 | 1983 | 163 | ABU-163 | 1743 | 2103 | 283 | ABU-283 |
| 1504 | 1864 | 44 | ABU-44 | 1624 | 1984 | 164 | ABU-164 | 1744 | 2104 | 284 | ABU-284 |
| 1505 | 1865 | 45 | ABU-45 | 1625 | 1985 | 165 | ABU-165 | 1745 | 2105 | 285 | ABU-285 |
| 1506 | 1866 | 46 | ABU-46 | 1626 | 1986 | 166 | ABU-166 | 1746 | 2106 | 286 | ABU-286 |
| 1507 | 1867 | 47 | ABU-47 | 1627 | 1987 | 167 | ABU-167 | 1747 | 2107 | 287 | ABU-287 |
| 1508 | 1868 | 48 | ABU-48 | 1628 | 1988 | 168 | ABU-168 | 1748 | 2108 | 288 | ABU-288 |
| 1509 | 1869 | 49 | ABU-49 | 1629 | 1989 | 169 | ABU-169 | 1749 | 2109 | 289 | ABU-289 |
| 1510 | 1870 | 50 | ABU-50 | 1630 | 1990 | 170 | ABU-170 | 1750 | 2110 | 290 | ABU-290 |
| 1511 | 1871 | 51 | ABU-51 | 1631 | 1991 | 171 | ABU-171 | 1751 | 2111 | 291 | ABU-291 |
| 1512 | 1872 | 52 | ABU-52 | 1632 | 1992 | 172 | ABU-172 | 1752 | 2112 | 292 | ABU-292 |
| 1513 | 1873 | 53 | ABU-53 | 1633 | 1993 | 173 | ABU-173 | 1753 | 2113 | 293 | ABU-293 |
| 1514 | 1874 | 54 | ABU-54 | 1634 | 1994 | 174 | ABU-174 | 1754 | 2114 | 294 | ABU-294 |
| 1515 | 1875 | 55 | ABU-55 | 1635 | 1995 | 175 | ABU-175 | 1755 | 2115 | 295 | ABU-295 |
| 1516 | 1876 | 56 | ABU-56 | 1636 | 1996 | 176 | ABU-176 | 1756 | 2116 | 296 | ABU-296 |
| 1517 | 1877 | 57 | ABU-57 | 1637 | 1997 | 177 | ABU-177 | 1757 | 2117 | 297 | ABU-297 |
| 1518 | 1878 | 58 | ABU-58 | 1638 | 1998 | 178 | ABU-178 | 1758 | 2118 | 298 | ABU-298 |
| 1519 | 1879 | 59 | ABU-59 | 1639 | 1999 | 179 | ABU-179 | 1759 | 2119 | 299 | ABU-299 |
| 1520 | 1880 | 60 | ABU-60 | 1640 | 2000 | 180 | ABU-180 | 1760 | 2120 | 300 | ABU-300 |
| 1521 | 1881 | 61 | ABU-61 | 1641 | 2001 | 181 | ABU-181 | 1761 | 2121 | 301 | ABU-301 |
| 1522 | 1882 | 62 | ABU-62 | 1642 | 2002 | 182 | ABU-182 | 1762 | 2122 | 302 | ABU-302 |
| 1523 | 1883 | 63 | ABU-63 | 1643 | 2003 | 183 | ABU-183 | 1763 | 2123 | 303 | ABU-303 |
| 1524 | 1884 | 64 | ABU-64 | 1644 | 2004 | 184 | ABU-184 | 1764 | 2124 | 304 | ABU-304 |
| 1525 | 1885 | 65 | ABU-65 | 1645 | 2005 | 185 | ABU-185 | 1765 | 2125 | 305 | ABU-305 |
| 1526 | 1886 | 66 | ABU-66 | 1646 | 2006 | 186 | ABU-186 | 1766 | 2126 | 306 | ABU-306 |
| 1527 | 1887 | 67 | ABU-67 | 1647 | 2007 | 187 | ABU-187 | 1767 | 2127 | 307 | ABU-307 |
| 1528 | 1888 | 68 | ABU-68 | 1648 | 2008 | 188 | ABU-188 | 1768 | 2128 | 308 | ABU-308 |
| 1529 | 1889 | 69 | ABU-69 | 1649 | 2009 | 189 | ABU-189 | 1769 | 2129 | 309 | ABU-309 |
| 1530 | 1890 | 70 | ABU-70 | 1650 | 2010 | 190 | ABU-190 | 1770 | 2130 | 310 | ABU-310 |
| 1531 | 1891 | 71 | ABU-71 | 1651 | 2011 | 191 | ABU-191 | 1771 | 2131 | 311 | ABU-311 |
| 1532 | 1892 | 72 | ABU-72 | 1652 | 2012 | 192 | ABU-192 | 1772 | 2132 | 312 | ABU-312 |
| 1533 | 1893 | 73 | ABU-73 | 1653 | 2013 | 193 | ABU-193 | 1773 | 2133 | 313 | ABU-313 |
| 1534 | 1894 | 74 | ABU-74 | 1654 | 2014 | 194 | ABU-194 | 1774 | 2134 | 314 | ABU-314 |
| 1535 | 1895 | 75 | ABU-75 | 1655 | 2015 | 195 | ABU-195 | 1775 | 2135 | 315 | ABU-315 |
| 1536 | 1896 | 76 | ABU-76 | 1656 | 2016 | 196 | ABU-196 | 1776 | 2136 | 316 | ABU-316 |
| 1537 | 1897 | 77 | ABU-77 | 1657 | 2017 | 197 | ABU-197 | 1777 | 2137 | 317 | ABU-317 |
| 1538 | 1898 | 78 | ABU-78 | 1658 | 2018 | 198 | ABU-198 | 1778 | 2138 | 318 | ABU-318 |
| 1539 | 1899 | 79 | ABU-79 | 1659 | 2019 | 199 | ABU-199 | 1779 | 2139 | 319 | ABU-319 |
| 1540 | 1900 | 80 | ABU-80 | 1660 | 2020 | 200 | ABU-200 | 1780 | 2140 | 320 | ABU-320 |
| 1541 | 1901 | 81 | ABU-81 | 1661 | 2021 | 201 | ABU-201 | 1781 | 2141 | 321 | ABU-321 |
| 1542 | 1902 | 82 | ABU-82 | 1662 | 2022 | 202 | ABU-202 | 1782 | 2142 | 322 | ABU-322 |
| 1543 | 1903 | 83 | ABU-83 | 1663 | 2023 | 203 | ABU-203 | 1783 | 2143 | 323 | ABU-323 |
| 1544 | 1904 | 84 | ABU-84 | 1664 | 2024 | 204 | ABU-204 | 1784 | 2144 | 324 | ABU-324 |
| 1545 | 1905 | 85 | ABU-85 | 1665 | 2025 | 205 | ABU-205 | 1785 | 2145 | 325 | ABU-325 |
| 1546 | 1906 | 86 | ABU-86 | 1666 | 2026 | 206 | ABU-206 | 1786 | 2146 | 326 | ABU-326 |
| 1547 | 1907 | 87 | ABU-87 | 1667 | 2027 | 207 | ABU-207 | 1787 | 2147 | 327 | ABU-327 |
| 1548 | 1908 | 88 | ABU-88 | 1668 | 2028 | 208 | ABU-208 | 1788 | 2148 | 328 | ABU-328 |
| 1549 | 1909 | 89 | ABU-89 | 1669 | 2029 | 209 | ABU-209 | 1789 | 2149 | 329 | ABU-329 |
| 1550 | 1910 | 90 | ABU-90 | 1670 | 2030 | 210 | ABU-210 | 1790 | 2150 | 330 | ABU-330 |
| 1551 | 1911 | 91 | ABU-91 | 1671 | 2031 | 211 | ABU-211 | 1791 | 2151 | 331 | ABU-331 |
| 1552 | 1912 | 92 | ABU-92 | 1672 | 2032 | 212 | ABU-212 | 1792 | 2152 | 332 | ABU-332 |
| 1553 | 1913 | 93 | ABU-93 | 1673 | 2033 | 213 | ABU-213 | 1793 | 2153 | 333 | ABU-333 |
| 1554 | 1914 | 94 | ABU-94 | 1674 | 2034 | 214 | ABU-214 | 1794 | 2154 | 334 | ABU-334 |
| 1555 | 1915 | 95 | ABU-95 | 1675 | 2035 | 215 | ABU-215 | 1795 | 2155 | 335 | ABU-335 |
| 1556 | 1916 | 96 | ABU-96 | 1676 | 2036 | 216 | ABU-216 | 1796 | 2156 | 336 | ABU-336 |
| 1557 | 1917 | 97 | ABU-97 | 1677 | 2037 | 217 | ABU-217 | 1797 | 2157 | 337 | ABU-337 |
| 1558 | 1918 | 98 | ABU-98 | 1678 | 2038 | 218 | ABU-218 | 1798 | 2158 | 338 | ABU-338 |
| 1559 | 1919 | 99 | ABU-99 | 1679 | 2039 | 219 | ABU-219 | 1799 | 2159 | 339 | ABU-339 |
| 1560 | 1920 | 100 | ABU-100 | 1680 | 2040 | 220 | ABU-220 | 1800 | 2160 | 340 | ABU-340 |
| 1561 | 1921 | 101 | ABU-101 | 1681 | 2041 | 221 | ABU-221 | 1801 | 2161 | 341 | ABU-341 |
| 1562 | 1922 | 102 | ABU-102 | 1682 | 2042 | 222 | ABU-222 | 1802 | 2162 | 342 | ABU-342 |
| 1563 | 1923 | 103 | ABU-103 | 1683 | 2043 | 223 | ABU-223 | 1803 | 2163 | 343 | ABU-343 |
| 1564 | 1924 | 104 | ABU-104 | 1684 | 2044 | 224 | ABU-224 | 1804 | 2164 | 344 | ABU-344 |
| 1565 | 1925 | 105 | ABU-105 | 1685 | 2045 | 225 | ABU-225 | 1805 | 2165 | 345 | ABU-345 |
| 1566 | 1926 | 106 | ABU-106 | 1686 | 2046 | 226 | ABU-226 | 1806 | 2166 | 346 | ABU-346 |
| 1567 | 1927 | 107 | ABU-107 | 1687 | 2047 | 227 | ABU-227 | 1807 | 2167 | 347 | ABU-347 |
| 1568 | 1928 | 108 | ABU-108 | 1688 | 2048 | 228 | ABU-228 | 1808 | 2168 | 348 | ABU-348 |
| 1569 | 1929 | 109 | ABU-109 | 1689 | 2049 | 229 | ABU-229 | 1809 | 2169 | 349 | ABU-349 |
| 1570 | 1930 | 110 | ABU-110 | 1690 | 2050 | 230 | ABU-230 | 1810 | 2170 | 350 | ABU-350 |
| 1571 | 1931 | 111 | ABU-111 | 1691 | 2051 | 231 | ABU-231 | 1811 | 2171 | 351 | ABU-351 |
| 1572 | 1932 | 112 | ABU-112 | 1692 | 2052 | 232 | ABU-232 | 1812 | 2172 | 352 | ABU-352 |
| 1573 | 1933 | 113 | ABU-113 | 1693 | 2053 | 233 | ABU-233 | 1813 | 2173 | 353 | ABU-353 |
| 1574 | 1934 | 114 | ABU-114 | 1694 | 2054 | 234 | ABU-234 | 1814 | 2174 | 354 | ABU-354 |
| 1575 | 1935 | 115 | ABU-115 | 1695 | 2055 | 235 | ABU-235 | 1815 | 2175 | 355 | ABU-355 |
| 1576 | 1936 | 116 | ABU-116 | 1696 | 2056 | 236 | ABU-236 | 1816 | 2176 | 356 | ABU-356 |
| 1577 | 1937 | 117 | ABU-117 | 1697 | 2057 | 237 | ABU-237 | 1817 | 2177 | 357 | ABU-357 |
| 1578 | 1938 | 118 | ABU-118 | 1698 | 2058 | 238 | ABU-238 | 1818 | 2178 | 358 | ABU-358 |
| 1579 | 1939 | 119 | ABU-119 | 1699 | 2059 | 239 | ABU-239 | 1819 | 2179 | 359 | ABU-359 |
| 1580 | 1940 | 120 | ABU-120 | 1700 | 2060 | 240 | ABU-240 | 1820 | 2180 | 360 | ABU-360 |
| 2901 | 2936 | 2971 | ABU-361 | 2913 | 2948 | 2983 | ABU-373 | 2925 | 2960 | 2995 | ABU-385 |
| 2902 | 2937 | 2972 | ABU-362 | 2914 | 2949 | 2984 | ABU-374 | 2926 | 2961 | 2996 | ABU-386 |
| 2903 | 2938 | 2973 | ABU-363 | 2915 | 2950 | 2985 | ABU-375 | 2927 | 2962 | 2997 | ABU-387 |
| 2904 | 2939 | 2974 | ABU-364 | 2916 | 2951 | 2986 | ABU-376 | 2928 | 2963 | 2998 | ABU-388 |
| 2905 | 2940 | 2975 | ABU-365 | 2917 | 2952 | 2987 | ABU-377 | 2929 | 2964 | 2999 | ABU-389 |
| 2906 | 2941 | 2976 | ABU-366 | 2918 | 2953 | 2988 | ABU-378 | 2930 | 2965 | 3000 | ABU-390 |
| 2907 | 2942 | 2977 | ABU-367 | 2919 | 2954 | 2989 | ABU-379 | 2931 | 2966 | 3001 | ABU-391 |
| 2908 | 2943 | 2978 | ABU-368 | 2920 | 2955 | 2990 | ABU-380 | 2932 | 2967 | 3002 | ABU-392 |
| 2909 | 2944 | 2979 | ABU-369 | 2921 | 2956 | 2991 | ABU-381 | 2933 | 2968 | 3003 | ABU-393 |
| 2910 | 2945 | 2980 | ABU-370 | 2922 | 2957 | 2992 | ABU-382 | 2934 | 2969 | 3004 | ABU-394 |
| 2911 | 2946 | 2981 | ABU-371 | 2923 | 2958 | 2993 | ABU-383 | 2935 | 2970 | 3005 | ABU-395 |
| 2912 | 2947 | 2982 | ABU-372 | 2924 | 2959 | 2994 | ABU-384 | | | | |

and the VL can comprise a sequence selected from combinations of CDR1, CDR2, and CDR3 as following:

| LCDR1 | LCDR2 | LCDR3 | ABU No. | LCDR1 | LCDR2 | LCDR3 | ABU No. | LCDR1 | LCDR2 | LCDR3 | ABU No. |
|---|---|---|---|---|---|---|---|---|---|---|---|
| 2181 | 2541 | 361 | ABU-1 | 2301 | 2661 | 481 | ABU-121 | 2421 | 2781 | 601 | ABU-241 |
| 2182 | 2542 | 362 | ABU-2 | 2302 | 2662 | 482 | ABU-122 | 2422 | 2782 | 602 | ABU-242 |
| 2183 | 2543 | 363 | ABU-3 | 2303 | 2663 | 483 | ABU-123 | 2423 | 2783 | 603 | ABU-243 |
| 2184 | 2544 | 364 | ABU-4 | 2304 | 2664 | 484 | ABU-124 | 2424 | 2784 | 604 | ABU-244 |
| 2185 | 2545 | 365 | ABU-5 | 2305 | 2665 | 485 | ABU-125 | 2425 | 2785 | 605 | ABU-245 |
| 2186 | 2546 | 366 | ABU-6 | 2306 | 2666 | 486 | ABU-126 | 2426 | 2786 | 606 | ABU-246 |
| 2187 | 2547 | 367 | ABU-7 | 2307 | 2667 | 487 | ABU-127 | 2427 | 2787 | 607 | ABU-247 |
| 2188 | 2548 | 368 | ABU-8 | 2308 | 2668 | 488 | ABU-128 | 2428 | 2788 | 608 | ABU-248 |
| 2189 | 2549 | 369 | ABU-9 | 2309 | 2669 | 489 | ABU-129 | 2429 | 2789 | 609 | ABU-249 |
| 2190 | 2550 | 370 | ABU-10 | 2310 | 2670 | 490 | ABU-130 | 2430 | 2790 | 610 | ABU-250 |
| 2191 | 2551 | 371 | ABU-11 | 2311 | 2671 | 491 | ABU-131 | 2431 | 2791 | 611 | ABU-251 |
| 2192 | 2552 | 372 | ABU-12 | 2312 | 2672 | 492 | ABU-132 | 2432 | 2792 | 612 | ABU-252 |
| 2193 | 2553 | 373 | ABU-13 | 2313 | 2673 | 493 | ABU-133 | 2433 | 2793 | 613 | ABU-253 |
| 2194 | 2554 | 374 | ABU-14 | 2314 | 2674 | 494 | ABU-134 | 2434 | 2794 | 614 | ABU-254 |
| 2195 | 2555 | 375 | ABU-15 | 2315 | 2675 | 495 | ABU-135 | 2435 | 2795 | 615 | ABU-255 |
| 2196 | 2556 | 376 | ABU-16 | 2316 | 2676 | 496 | ABU-136 | 2436 | 2796 | 616 | ABU-256 |
| 2197 | 2557 | 377 | ABU-17 | 2317 | 2677 | 497 | ABU-137 | 2437 | 2797 | 617 | ABU-257 |
| 2198 | 2558 | 378 | ABU-18 | 2318 | 2678 | 498 | ABU-138 | 2438 | 2798 | 618 | ABU-258 |
| 2199 | 2559 | 379 | ABU-19 | 2319 | 2679 | 499 | ABU-139 | 2439 | 2799 | 619 | ABU-259 |
| 2200 | 2560 | 380 | ABU-20 | 2320 | 2680 | 500 | ABU-140 | 2440 | 2800 | 620 | ABU-260 |
| 2201 | 2561 | 381 | ABU-21 | 2321 | 2681 | 501 | ABU-141 | 2441 | 2801 | 621 | ABU-261 |
| 2202 | 2562 | 382 | ABU-22 | 2322 | 2682 | 502 | ABU-142 | 2442 | 2802 | 622 | ABU-262 |
| 2203 | 2563 | 383 | ABU-23 | 2323 | 2683 | 503 | ABU-143 | 2443 | 2803 | 623 | ABU-263 |
| 2204 | 2564 | 384 | ABU-24 | 2324 | 2684 | 504 | ABU-144 | 2444 | 2804 | 624 | ABU-264 |
| 2205 | 2565 | 385 | ABU-25 | 2325 | 2685 | 505 | ABU-145 | 2445 | 2805 | 625 | ABU-265 |
| 2206 | 2566 | 386 | ABU-26 | 2326 | 2686 | 506 | ABU-146 | 2446 | 2806 | 626 | ABU-266 |
| 2207 | 2567 | 387 | ABU-27 | 2327 | 2687 | 507 | ABU-147 | 2447 | 2807 | 627 | ABU-267 |
| 2208 | 2568 | 388 | ABU-28 | 2328 | 2688 | 508 | ABU-148 | 2448 | 2808 | 628 | ABU-268 |
| 2209 | 2569 | 389 | ABU-29 | 2329 | 2689 | 509 | ABU-149 | 2449 | 2809 | 629 | ABU-269 |
| 2210 | 2570 | 390 | ABU-30 | 2330 | 2690 | 510 | ABU-150 | 2450 | 2810 | 630 | ABU-270 |
| 2211 | 2571 | 391 | ABU-31 | 2331 | 2691 | 511 | ABU-151 | 2451 | 2811 | 631 | ABU-271 |
| 2212 | 2572 | 392 | ABU-32 | 2332 | 2692 | 512 | ABU-152 | 2452 | 2812 | 632 | ABU-272 |
| 2213 | 2573 | 393 | ABU-33 | 2333 | 2693 | 513 | ABU-153 | 2453 | 2813 | 633 | ABU-273 |
| 2214 | 2574 | 394 | ABU-34 | 2334 | 2694 | 514 | ABU-154 | 2454 | 2814 | 634 | ABU-274 |
| 2215 | 2575 | 395 | ABU-35 | 2335 | 2695 | 515 | ABU-155 | 2455 | 2815 | 635 | ABU-275 |
| 2216 | 2576 | 396 | ABU-36 | 2336 | 2696 | 516 | ABU-156 | 2456 | 2816 | 636 | ABU-276 |
| 2217 | 2577 | 397 | ABU-37 | 2337 | 2697 | 517 | ABU-157 | 2457 | 2817 | 637 | ABU-277 |
| 2218 | 2578 | 398 | ABU-38 | 2338 | 2698 | 518 | ABU-158 | 2458 | 2818 | 638 | ABU-278 |
| 2219 | 2579 | 399 | ABU-39 | 2339 | 2699 | 519 | ABU-159 | 2459 | 2819 | 639 | ABU-279 |
| 2220 | 2580 | 400 | ABU-40 | 2340 | 2700 | 520 | ABU-160 | 2460 | 2820 | 640 | ABU-280 |
| 2221 | 2581 | 401 | ABU-41 | 2341 | 2701 | 521 | ABU-161 | 2461 | 2821 | 641 | ABU-281 |
| 2222 | 2582 | 402 | ABU-42 | 2342 | 2702 | 522 | ABU-162 | 2462 | 2822 | 642 | ABU-282 |
| 2223 | 2583 | 403 | ABU-43 | 2343 | 2703 | 523 | ABU-163 | 2463 | 2823 | 643 | ABU-283 |
| 2224 | 2584 | 404 | ABU-44 | 2344 | 2704 | 524 | ABU-164 | 2464 | 2824 | 644 | ABU-284 |
| 2225 | 2585 | 405 | ABU-45 | 2345 | 2705 | 525 | ABU-165 | 2465 | 2825 | 645 | ABU-285 |
| 2226 | 2586 | 406 | ABU-46 | 2346 | 2706 | 526 | ABU-166 | 2466 | 2826 | 646 | ABU-286 |
| 2227 | 2587 | 407 | ABU-47 | 2347 | 2707 | 527 | ABU-167 | 2467 | 2827 | 647 | ABU-287 |
| 2228 | 2588 | 408 | ABU-48 | 2348 | 2708 | 528 | ABU-168 | 2468 | 2828 | 648 | ABU-288 |
| 2229 | 2589 | 409 | ABU-49 | 2349 | 2709 | 529 | ABU-169 | 2469 | 2829 | 649 | ABU-289 |
| 2230 | 2590 | 410 | ABU-50 | 2350 | 2710 | 530 | ABU-170 | 2470 | 2830 | 650 | ABU-290 |
| 2231 | 2591 | 411 | ABU-51 | 2351 | 2711 | 531 | ABU-171 | 2471 | 2831 | 651 | ABU-291 |
| 2232 | 2592 | 412 | ABU-52 | 2352 | 2712 | 532 | ABU-172 | 2472 | 2832 | 652 | ABU-292 |
| 2233 | 2593 | 413 | ABU-53 | 2353 | 2713 | 533 | ABU-173 | 2473 | 2833 | 653 | ABU-293 |
| 2234 | 2594 | 414 | ABU-54 | 2354 | 2714 | 534 | ABU-174 | 2474 | 2834 | 654 | ABU-294 |
| 2235 | 2595 | 415 | ABU-55 | 2355 | 2715 | 535 | ABU-175 | 2475 | 2835 | 655 | ABU-295 |
| 2236 | 2596 | 416 | ABU-56 | 2356 | 2716 | 536 | ABU-176 | 2476 | 2836 | 656 | ABU-296 |
| 2237 | 2597 | 417 | ABU-57 | 2357 | 2717 | 537 | ABU-177 | 2477 | 2837 | 657 | ABU-297 |
| 2238 | 2598 | 418 | ABU-58 | 2358 | 2718 | 538 | ABU-178 | 2478 | 2838 | 658 | ABU-298 |
| 2239 | 2599 | 419 | ABU-59 | 2359 | 2719 | 539 | ABU-179 | 2479 | 2839 | 659 | ABU-299 |
| 2240 | 2600 | 420 | ABU-60 | 2360 | 2720 | 540 | ABU-180 | 2480 | 2840 | 660 | ABU-300 |
| 2241 | 2601 | 421 | ABU-61 | 2361 | 2721 | 541 | ABU-181 | 2481 | 2841 | 661 | ABU-301 |
| 2242 | 2602 | 422 | ABU-62 | 2362 | 2722 | 542 | ABU-182 | 2482 | 2842 | 662 | ABU-302 |
| 2243 | 2603 | 423 | ABU-63 | 2363 | 2723 | 543 | ABU-183 | 2483 | 2843 | 663 | ABU-303 |
| 2244 | 2604 | 424 | ABU-64 | 2364 | 2724 | 544 | ABU-184 | 2484 | 2844 | 664 | ABU-304 |
| 2245 | 2605 | 425 | ABU-65 | 2365 | 2725 | 545 | ABU-185 | 2485 | 2845 | 665 | ABU-305 |
| 2246 | 2606 | 426 | ABU-66 | 2366 | 2726 | 546 | ABU-186 | 2486 | 2846 | 666 | ABU-306 |
| 2247 | 2607 | 427 | ABU-67 | 2367 | 2727 | 547 | ABU-187 | 2487 | 2847 | 667 | ABU-307 |
| 2248 | 2608 | 428 | ABU-68 | 2368 | 2728 | 548 | ABU-188 | 2488 | 2848 | 668 | ABU-308 |
| 2249 | 2609 | 429 | ABU-69 | 2369 | 2729 | 549 | ABU-189 | 2489 | 2849 | 669 | ABU-309 |
| 2250 | 2610 | 430 | ABU-70 | 2370 | 2730 | 550 | ABU-190 | 2490 | 2850 | 670 | ABU-310 |
| 2251 | 2611 | 431 | ABU-71 | 2371 | 2731 | 551 | ABU-191 | 2491 | 2851 | 671 | ABU-311 |
| 2252 | 2612 | 432 | ABU-72 | 2372 | 2732 | 552 | ABU-192 | 2492 | 2852 | 672 | ABU-312 |
| 2253 | 2613 | 433 | ABU-73 | 2373 | 2733 | 553 | ABU-193 | 2493 | 2853 | 673 | ABU-313 |
| 2254 | 2614 | 434 | ABU-74 | 2374 | 2734 | 554 | ABU-194 | 2494 | 2854 | 674 | ABU-314 |
| 2255 | 2615 | 435 | ABU-75 | 2375 | 2735 | 555 | ABU-195 | 2495 | 2855 | 675 | ABU-315 |
| 2256 | 2616 | 436 | ABU-76 | 2376 | 2736 | 556 | ABU-196 | 2496 | 2856 | 676 | ABU-316 |
| 2257 | 2617 | 437 | ABU-77 | 2377 | 2737 | 557 | ABU-197 | 2497 | 2857 | 677 | ABU-317 |
| 2258 | 2618 | 438 | ABU-78 | 2378 | 2738 | 558 | ABU-198 | 2498 | 2858 | 678 | ABU-318 |
| 2259 | 2619 | 439 | ABU-79 | 2379 | 2739 | 559 | ABU-199 | 2499 | 2859 | 679 | ABU-319 |
| 2260 | 2620 | 440 | ABU-80 | 2380 | 2740 | 560 | ABU-200 | 2500 | 2860 | 680 | ABU-320 |
| 2261 | 2621 | 441 | ABU-81 | 2381 | 2741 | 561 | ABU-201 | 2501 | 2861 | 681 | ABU-321 |
| 2262 | 2622 | 442 | ABU-82 | 2382 | 2742 | 562 | ABU-202 | 2502 | 2862 | 682 | ABU-322 |
| 2263 | 2623 | 443 | ABU-83 | 2383 | 2743 | 563 | ABU-203 | 2503 | 2863 | 683 | ABU-323 |
| 2264 | 2624 | 444 | ABU-84 | 2384 | 2744 | 564 | ABU-204 | 2504 | 2864 | 684 | ABU-324 |
| 2265 | 2625 | 445 | ABU-85 | 2385 | 2745 | 565 | ABU-205 | 2505 | 2865 | 685 | ABU-325 |
| 2266 | 2626 | 446 | ABU-86 | 2386 | 2746 | 566 | ABU-206 | 2506 | 2866 | 686 | ABU-326 |
| 2267 | 2627 | 447 | ABU-87 | 2387 | 2747 | 567 | ABU-207 | 2507 | 2867 | 687 | ABU-327 |
| 2268 | 2628 | 448 | ABU-88 | 2388 | 2748 | 568 | ABU-208 | 2508 | 2868 | 688 | ABU-328 |
| 2269 | 2629 | 449 | ABU-89 | 2389 | 2749 | 569 | ABU-209 | 2509 | 2869 | 689 | ABU-329 |
| 2270 | 2630 | 450 | ABU-90 | 2390 | 2750 | 570 | ABU-210 | 2510 | 2870 | 690 | ABU-330 |
| 2271 | 2631 | 451 | ABU-91 | 2391 | 2751 | 571 | ABU-211 | 2511 | 2871 | 691 | ABU-331 |
| 2272 | 2632 | 452 | ABU-92 | 2392 | 2752 | 572 | ABU-212 | 2512 | 2872 | 692 | ABU-332 |
| 2273 | 2633 | 453 | ABU-93 | 2393 | 2753 | 573 | ABU-213 | 2513 | 2873 | 693 | ABU-333 |
| 2274 | 2634 | 454 | ABU-94 | 2394 | 2754 | 574 | ABU-214 | 2514 | 2874 | 694 | ABU-334 |
| 2275 | 2635 | 455 | ABU-95 | 2395 | 2755 | 575 | ABU-215 | 2515 | 2875 | 695 | ABU-335 |
| 2276 | 2636 | 456 | ABU-96 | 2396 | 2756 | 576 | ABU-216 | 2516 | 2876 | 696 | ABU-336 |
| 2277 | 2637 | 457 | ABU-97 | 2397 | 2757 | 577 | ABU-217 | 2517 | 2877 | 697 | ABU-337 |
| 2278 | 2638 | 458 | ABU-98 | 2398 | 2758 | 578 | ABU-218 | 2518 | 2878 | 698 | ABU-338 |
| 2279 | 2639 | 459 | ABU-99 | 2399 | 2759 | 579 | ABU-219 | 2519 | 2879 | 699 | ABU-339 |
| 2280 | 2640 | 460 | ABU-100 | 2400 | 2760 | 580 | ABU-220 | 2520 | 2880 | 700 | ABU-340 |
| 2281 | 2641 | 461 | ABU-101 | 2401 | 2761 | 581 | ABU-221 | 2521 | 2881 | 701 | ABU-341 |
| 2282 | 2642 | 462 | ABU-102 | 2402 | 2762 | 582 | ABU-222 | 2522 | 2882 | 702 | ABU-342 |
| 2283 | 2643 | 463 | ABU-103 | 2403 | 2763 | 583 | ABU-223 | 2523 | 2883 | 703 | ABU-343 |
| 2284 | 2644 | 464 | ABU-104 | 2404 | 2764 | 584 | ABU-224 | 2524 | 2884 | 704 | ABU-344 |
| 2285 | 2645 | 465 | ABU-105 | 2405 | 2765 | 585 | ABU-225 | 2525 | 2885 | 705 | ABU-345 |
| 2286 | 2646 | 466 | ABU-106 | 2406 | 2766 | 586 | ABU-226 | 2526 | 2886 | 706 | ABU-346 |
| 2287 | 2647 | 467 | ABU-107 | 2407 | 2767 | 587 | ABU-227 | 2527 | 2887 | 707 | ABU-347 |
| 2288 | 2648 | 468 | ABU-108 | 2408 | 2768 | 588 | ABU-228 | 2528 | 2888 | 708 | ABU-348 |
| 2289 | 2649 | 469 | ABU-109 | 2409 | 2769 | 589 | ABU-229 | 2529 | 2889 | 709 | ABU-349 |
| 2290 | 2650 | 470 | ABU-110 | 2410 | 2770 | 590 | ABU-230 | 2530 | 2890 | 710 | ABU-350 |
| 2291 | 2651 | 471 | ABU-111 | 2411 | 2771 | 591 | ABU-231 | 2531 | 2891 | 711 | ABU-351 |
| 2292 | 2652 | 472 | ABU-112 | 2412 | 2772 | 592 | ABU-232 | 2532 | 2892 | 712 | ABU-352 |
| 2293 | 2653 | 473 | ABU-113 | 2413 | 2773 | 593 | ABU-233 | 2533 | 2893 | 713 | ABU-353 |
| 2294 | 2654 | 474 | ABU-114 | 2414 | 2774 | 594 | ABU-234 | 2534 | 2894 | 714 | ABU-354 |
| 2295 | 2655 | 475 | ABU-115 | 2415 | 2775 | 595 | ABU-235 | 2535 | 2895 | 715 | ABU-355 |
| 2296 | 2656 | 476 | ABU-116 | 2416 | 2776 | 596 | ABU-236 | 2536 | 2896 | 716 | ABU-356 |
| 2297 | 2657 | 477 | ABU-117 | 2417 | 2777 | 597 | ABU-237 | 2537 | 2897 | 717 | ABU-357 |
| 2298 | 2658 | 478 | ABU-118 | 2418 | 2778 | 598 | ABU-238 | 2538 | 2898 | 718 | ABU-358 |
| 2299 | 2659 | 479 | ABU-119 | 2419 | 2779 | 599 | ABU-239 | 2539 | 2899 | 719 | ABU-359 |
| 2300 | 2660 | 480 | ABU-120 | 2420 | 2780 | 600 | ABU-240 | 2540 | 2900 | 720 | ABU-360 |
| 3006 | 3041 | 3076 | ABU-361 | 3018 | 3053 | 3088 | ABU-373 | 3030 | 3065 | 3100 | ABU-385 |
| 3007 | 3042 | 3077 | ABU-362 | 3019 | 3054 | 3089 | ABU-374 | 3031 | 3066 | 3101 | ABU-386 |
| 3008 | 3043 | 3078 | ABU-363 | 3020 | 3055 | 3090 | ABU-375 | 3032 | 3067 | 3102 | ABU-387 |
| 3009 | 3044 | 3079 | ABU-364 | 3021 | 3056 | 3091 | ABU-376 | 3033 | 3068 | 3103 | ABU-388 |
| 3010 | 3045 | 3080 | ABU-365 | 3022 | 3057 | 3092 | ABU-377 | 3034 | 3069 | 3104 | ABU-389 |
| 3011 | 3046 | 3081 | ABU-366 | 3023 | 3058 | 3093 | ABU-378 | 3035 | 3070 | 3105 | ABU-390 |
| 3012 | 3047 | 3082 | ABU-367 | 3024 | 3059 | 3094 | ABU-379 | 3036 | 3071 | 3106 | ABU-391 |
| 3013 | 3048 | 3083 | ABU-368 | 3025 | 3060 | 3095 | ABU-380 | 3037 | 3072 | 3107 | ABU-392 |
| 3014 | 3049 | 3084 | ABU-369 | 3026 | 3061 | 3096 | ABU-381 | 3038 | 3073 | 3108 | ABU-393 |
| 3015 | 3050 | 3085 | ABU-370 | 3027 | 3062 | 3097 | ABU-382 | 3039 | 3074 | 3109 | ABU-394 |
| 3016 | 3051 | 3086 | ABU-371 | 3028 | 3063 | 3098 | ABU-383 | 3040 | 3075 | 3110 | ABU-395 |
| 3017 | 3052 | 3087 | ABU-372 | 3029 | 3064 | 3099 | ABU-384 | | | | |

[0095] The VH CDR1 of the antigen-binding unit of the present invention can comprise the same sequence as CDR1 contained in SEQ ID NOs: 721-1080 and 3111-3145; the VH CDR2 of the antigen-binding unit of the present invention can comprise the same sequence as CDR2 contained in SEQ ID NOs: 721-1080 and 3111-3145; the VH CDR3 of the antigen-binding unit of the present invention can comprise the same sequence as CDR3 contained in SEQ ID NOs: 721-1080 and 3111-3145; the VL CDR1 of the antigen-binding unit can comprise the same sequence as CDR1 contained in SEQ ID NOs: 1081-1440 and 3146-3180; the VL CDR2 of the antigen-binding unit can comprise the same sequence as CDR2 contained in SEQ ID NOs: 1081-1440 and 3146-3180; and/or the VL CDR3 of the antigen-binding unit can comprise the same sequence as CDR3 contained in SEQ ID NOs: 1081-1440 and 3146-3180.

[0096] In one embodiment, the antibody provided in the present invention comprises one, two, three, four, five or six amino acid sequences, wherein each amino acid sequence is independently selected from the amino acid sequences listed below:

[0097] a. amino acid sequences of light chain variable region CDR1: SEQ ID NO: 2354, SEQ ID NO: 2355, SEQ ID NO: 2370, SEQ ID NO: 2477, and SEQ ID NO: 3012;

[0098] b. amino acid sequences of light chain variable region CDR2: SEQ ID NO: 2714, SEQ ID NO: 2715, SEQ ID NO: 2730, SEQ ID NO: 2837, and SEQ ID NO: 3047;

[0099] c. amino acid sequences of light chain variable region CDR3: SEQ ID NO: 534, SEQ ID NO: 535, SEQ ID NO: 550, SEQ ID NO: 657, and SEQ ID NO: 3082;

[0100] d. amino acid sequences of heavy chain variable region CDR1: SEQ ID NO: 1634, SEQ ID NO: 1635, SEQ ID NO: 1650, SEQ ID NO: 1757, and SEQ ID NO: 2907;

[0101] e. amino acid sequences of heavy chain variable region CDR2: SEQ ID NO: 1994, SEQ ID NO: 1995, SEQ ID NO: 2010, SEQ ID NO: 2117, and SEQ ID NO: 2942; and

[0102] f. amino acid sequences of heavy chain variable region CDR3: SEQ ID NO: 174, SEQ ID NO: 175, SEQ ID NO: 190, SEQ ID NO: 297, and SEQ ID NO: 2977.

[0103] In one embodiment, the antibody provided in the present invention comprises one, two, three, four, five or six amino acid sequences, wherein each amino acid sequence is independently selected from the amino acid sequences listed below:

[0104] a. amino acid sequences of light chain variable region CDR1: SEQ ID NO: 2354;

[0105] b. amino acid sequences of light chain variable region CDR2: SEQ ID NO: 2714;

[0106] c. amino acid sequences of light chain variable region CDR3: SEQ ID NO: 534;

[0107] d. amino acid sequences of heavy chain variable region CDR1: SEQ ID NO: 1634;

[0108] e. amino acid sequences of heavy chain variable region CDR2: SEQ ID NO: 1994; and

[0109] f. amino acid sequences of heavy chain variable region CDR3: SEQ ID NO: 174.

[0110] In one embodiment, the antibody provided in the present invention comprises one, two, three, four, five or six amino acid sequences, wherein each amino acid sequence is independently selected from the amino acid sequences listed below:

[0111] a. amino acid sequences of light chain variable region CDR1: SEQ ID NO: 2355;

[0112] b. amino acid sequences of light chain variable region CDR2: SEQ ID NO: 2715;

[0113] c. amino acid sequences of light chain variable region CDR3: SEQ ID NO: 535;

[0114] d. amino acid sequences of heavy chain variable region CDR1: SEQ ID NO: 1635;

[0115] e. amino acid sequences of heavy chain variable region CDR2: SEQ ID NO: 1995; and

[0116] f. amino acid sequences of heavy chain variable region CDR3: SEQ ID NO: 175.

[0117] In one embodiment, the antibody provided in the present invention comprises one, two, three, four, five or six amino acid sequences, wherein each amino acid sequence is independently selected from the amino acid sequences listed below:

[0118] a. amino acid sequences of light chain variable region CDR1: SEQ ID NO: 2370;

[0119] b. amino acid sequences of light chain variable region CDR2: SEQ ID NO: 2730;

[0120] c. amino acid sequences of light chain variable region CDR3: SEQ ID NO: 550;

[0121] d. amino acid sequences of heavy chain variable region CDR1: SEQ ID NO: 1650;

[0122] e. amino acid sequences of heavy chain variable region CDR2: SEQ ID NO: 2010; and

[0123] f. amino acid sequences of heavy chain variable region CDR3: SEQ ID NO: 190.

[0124] In one embodiment, the antibody provided in the present invention comprises one, two, three, four, five or six amino acid sequences, wherein each amino acid sequence is independently selected from the amino acid sequences listed below:

[0125] a. amino acid sequences of light chain variable region CDR1: SEQ ID NO: 2477;

[0126] b. amino acid sequences of light chain variable region CDR2: SEQ ID NO: 2837;

[0127] c. amino acid sequences of light chain variable region CDR3: SEQ ID NO: 657;

[0128] d. amino acid sequences of heavy chain variable region CDR1: SEQ ID NO: 1757;

[0129] e. amino acid sequences of heavy chain variable region CDR2: SEQ ID NO: 2117; and

[0130] f. amino acid sequences of heavy chain variable region CDR3: SEQ ID NO: 297.

[0131] In one embodiment, the antibody provided in the present invention comprises one, two, three, four, five or six amino acid sequences, wherein each amino acid sequence is independently selected from the amino acid sequences listed below:

[0132] a. amino acid sequences of light chain variable region CDR1: SEQ ID NO: 3012;

[0133] b. amino acid sequences of light chain variable region CDR2: SEQ ID NO: 3047;

[0134] c. amino acid sequences of light chain variable region CDR3: SEQ ID NO: 3082;

[0135] d. amino acid sequences of heavy chain variable region CDR1: SEQ ID NO: 2907;

[0136] e. amino acid sequences of heavy chain variable region CDR2: SEQ ID NO: 2942; and

[0137] f. amino acid sequences of heavy chain variable region CDR3: SEQ ID NO: 2977.

[0138] In one embodiment, the antibody provided in the present invention comprises one or two amino acid sequences, wherein each amino acid sequence is independently selected from the amino acid sequences listed below:

[0139] a. amino acid sequences of a light chain variable region: SEQ ID NO: 1377 and SEQ ID NO: 3152; and

[0140] b. amino acid sequences of a heavy chain variable region: SEQ ID NO: 1017 and SEQ ID NO: 3117.

[0141] In one embodiment, the antibody provided in the present invention comprises one or two amino acid sequences, wherein each amino acid sequence is independently selected from the amino acid sequences listed below:

[0142] a. amino acid sequences of a light chain variable region: SEQ ID NO: 1254; and

[0143] b. amino acid sequences of a heavy chain variable region: SEQ ID NO: 894.

[0144] In one embodiment, the antibody provided in the present invention comprises one or two amino acid sequences, wherein each amino acid sequence is independently selected from the amino acid sequences listed below:

[0145] a. amino acid sequences of a light chain variable region: SEQ ID NO: 1255; and

[0146] b. amino acid sequences of a heavy chain variable region: SEQ ID NO: 895.

[0147] In one embodiment, the antibody provided in the present invention comprises one or two amino acid sequences, wherein each amino acid sequence is independently selected from the amino acid sequences listed below:

[0148] a. amino acid sequences of a light chain variable region: SEQ ID NO: 1270; and

[0149] b. amino acid sequences of a heavy chain variable region: SEQ ID NO: 910.

[0150] In one embodiment, the antibody provided in the present invention comprises one or two amino acid sequences, wherein each amino acid sequence is independently selected from the amino acid sequences listed below:

[0151] a. amino acid sequences of a light chain variable region: SEQ ID NO: 1377; and

[0152] b. amino acid sequences of a heavy chain variable region: SEQ ID NO: 1017.

[0153] In one embodiment, the antibody provided in the present invention comprises one or two amino acid sequences, wherein each amino acid sequence is independently selected from the amino acid sequences listed below:

[0154] a. amino acid sequences of a light chain variable region: SEQ ID NO: 3152; and

[0155] b. amino acid sequences of a heavy chain variable region: SEQ ID NO: 3117.

[0156] The antigen-binding unit of the present invention can bind to the S protein of a novel coronavirus (SARS-CoV-2). The antigen-binding unit of the present invention can bind to a receptor binding domain (RBD) of an S protein of a novel coronavirus (SARS-CoV-2). Binding of the antigen-binding unit to the RBD can be characterized or represented by any method known in the art. For example, binding can be characterized by binding affinity, which can be the strength of the interaction between the antigen-binding unit and the antigen. Binding affinity can be determined by any method known in the art, such as in vitro binding experiment. The binding affinity of the antigen-binding unit of the present invention can be represented by KD, which is defined as the ratio of two kinetic rate constants Ka/Kd, wherein “Ka” refers to the rate constant for the binding of an antibody to an antigen and “Kd” refers to the rate constant for the dissociation of the antibody from the antibody/antigen complex. The antigen-binding unit as disclosed herein specifically binds to a receptor binding domain (RBD) of an S protein of a novel coronavirus (SARS-CoV-2) with a KD in the range of about 10 μM to about 1 fM. For example, the antigen-binding unit can specifically bind to a receptor binding domain (RBD) of an S protein of a novel coronavirus (SARS-CoV-2) with a KD of less than about 10 μM, 1 μM, 0.1 μM, 50 nM, 20 nM, 15 nM, 10 nM, 5 nM, 4 nM, 3 nM, 2 nM, 1 nM, 0.5 nM, 0.1 nM, 50 pM, 10 pM, 1 pM, 0.1 pM, 10 fM, 1 fM, 0.1 fM or less than 0.1 fM. The antigen-binding unit disclosed herein can bind to a receptor binding domain (RBD) of an S protein of a novel coronavirus (SARS-CoV-2) with an equilibrium dissociation constant (KD) of less than 100 nM, less than 50 nM, less than 20 nM, less than 15 nM, less than 10 nM, less than 5 nM, less than 4 nM, less than 3 nM, less than 2 nM, less than 1 nM, less than 0.5 nM, less than 0.1 nM, less than 0.05 nM, or less than 0.01 nM.

[0157] The antigen-binding unit of the present invention has a neutralizing activity against a novel coronavirus (SARS-CoV-2). The neutralizing activity of the antigen-binding unit of the present invention against the novel coronavirus (SARS-CoV-2) can be analyzed using pseudovirus. The pseudovirus has similar cell infection characteristics to the euvirus, can be used to simulate the early process of euvirus infection in a cell, and can be safely and quickly detected and analyzed. The neutralizing activity of the antigen-binding unit of the present invention against the novel coronavirus (SARS-CoV-2) can be detected by a method known in the art, such as using cell microneutralization assay, which is performed with reference to the description of Temperton N J et al., Emerg Infect Dis, 2005, 11(3), 411-416.

[0158] The neutralizing activity of the antigen-binding unit of the present invention against the novel coronavirus (SARS-CoV-2) can be detected by using an experimental cell, such as Huh-7 cell and pseudovirus SARS-CoV-2. The antigen-binding unit of the present invention can neutralize the novel coronavirus (SARS-CoV-2) pseudovirus with an IC₅₀ of less than 100 μg/ml, less than 50 μg/ml, less than 20 μg/ml, less than 10 μg/ml, less than 9 μg/ml, less than 8 μg/ml, less than 7 μg/ml, less than 6 μg/ml, less than 5 μg/ml, less than 4 μg/ml, less than 3 μg/ml, less than 2 μg/ml, less than 1 μg/ml, less than 0.5 μg/ml, less than 0.25 μg/ml, less than 0.2 μg/ml, less than 0.1 μg/ml, less than 0.05 μg/ml, less than 1 ng/ml, less than 0.5 ng/ml, less than 0.25 ng/ml, less than 0.2 ng/ml, less than 0.1 ng/ml, less than 50 pg/ml, less than 25 pg/ml, less than 20 pg/ml, less than 10 pg/ml, less than 5 pg/ml, less than 2.5 pg/ml, less than 2 pg/ml, or less than 1 pg/ml.

[0159] The neutralizing activity of the antigen-binding unit of the present invention against the novel coronavirus (SARS-CoV-2) can be detected by Plaque Reduction Neutralization Test (PRNT) using a SARS-CoV-2 euvirus, wherein the IC₅₀ of the antigen-binding unit of the present invention for neutralization of the SARS-CoV-2 euvirus is calculated according to the reduction of plaques after incubation. The antigen-binding unit of the present invention can neutralize the novel coronavirus (SARS-CoV-2) euvirus with an IC₅₀ of less than 100 μg/ml, less than 50 μg/ml, less than 20 μg/ml, less than 10 μg/ml, less than 9 μg/ml, less than 8 μg/ml, less than 7 μg/ml, less than 6 μg/ml, less than 5 μg/ml, less than 4 μg/ml, less than 3 μg/ml, less than 2 μg/ml, less than 1 μg/ml, less than 0.5 μg/ml, less than 0.25 μg/ml, less than 0.2 μg/ml, less than 0.1 μg/ml, less than 0.05 μg/ml, less than 1 ng/ml, less than 0.5 ng/ml, less than 0.25 ng/ml, less than 0.2 ng/ml, less than 0.1 ng/ml, less than 50 pg/ml, less than 25 pg/ml, less than 20 pg/ml, less than 10 pg/ml, less than 5 pg/ml, less than 2.5 pg/ml, less than 2 pg/ml, or less than 1 pg/ml.

### Preparation of Antigen-Binding Unit

[0160] Provided herein is a method for producing any of the antigen-binding units disclosed herein, wherein the method comprises culturing a host cell expressing the antigen-binding unit under conditions suitable for the expression of the antigen-binding unit and isolating the antigen-binding unit expressed by the host cell.

[0161] The expressed antigen-binding unit can be isolated using various protein purification techniques known in the art. Generally, the antigen-binding units are isolated from media as secreted polypeptides, although they can also be recovered from a host cell lysate or bacterial periplasm when produced directly in the absence of a signal peptide. If the antigen-binding units are membrane-bound, they can be dissolved in a suitable detergent solution commonly used by a person skilled in the art. The recovered antigen-binding units can be further purified by salt precipitation (e.g., with ammonium sulfate), ion exchange chromatography (e.g., running on a cation or anion exchange column at neutral pH and eluting with a step gradient of increasing ionic strength), gel filtration chromatography (including gel filtration HPLC) and tag affinity column chromatography, or affinity resin, such as protein A, protein G, hydroxyapatite and anti-immunoglobulins.

[0162] The derived immunoglobulins to which the following moieties are added can be used in the methods and compositions of the present invention: a chemical linker, a detectable moiety such as a fluorescent dye, an enzyme, a substrate, a chemiluminescent moiety, a specific binding moiety such as streptavidin, avidin or biotin, or a drug conjugate.

[0163] The present invention further provides an antigen-binding unit conjugated to a chemically functional moiety. Generally, the moiety is a label capable of producing a detectable signal. These conjugated antigen-binding units can be used, for example, in a detection system, such as for detecting the severity of viral infection, imaging of infection focus, etc. Such labels are known in the art and include but are not limited to a radioisotope, an enzyme, a fluorescent compound, a chemiluminescent compound, a bioluminescent compound, a substrate, a cofactor and an inhibitor. See U.S. Pat. Nos. 3,817,837; 3,850,752; 3,939,350; 3,996,345; 4,277,437; 4,275,149; and 4,366,241 for examples of patents teaching the use of such labels. The moiety can be covalently linked or recombinantly linked to the antigen-binding unit, or conjugated to the antigen-binding unit via a second reagent such as a second antibody, protein A or a biotin-avidin complex.

[0164] Other functional moieties include a signal peptide, a reagent enhancing immunoreactivity, a reagent facilitating coupling to a solid support, a vaccine carrier, a biological response modifier, a paramagnetic label, and a drug. The signal peptide is a short amino acid sequence that guides a newly synthesized protein through the cell membrane (usually the endoplasmic reticulum in an eukaryotic cell) and the inner membrane or both inner and outer membranes of a bacterium. The signal peptide can be located at the N-terminal portion of a polypeptide or the C-terminal portion of a polypeptide, and can be enzymatically removed from the cell between the biosynthesis and secretion of the polypeptide. Such peptides can be introduced into the antigen-binding unit to allow secretion of a synthetic molecule.

[0165] The reagent enhancing immunoreactivity includes but is not limited to a bacterial superantigen. The reagent facilitating coupling to a solid support includes but is not limited to biotin or avidin. The immunogen carrier includes but is not limited to, any physiologically acceptable buffers. The biological response modifier includes a cytokine, particularly tumor necrosis factor (TNF), interleukin-2, interleukin-4, granulocyte macrophage colony stimulating factor and y-interferon.

[0166] The chemically functional moiety can be prepared recombinantly, for example by generating a fusion gene encoding the antigen-binding unit and the functional moiety. Alternatively, the antigen-binding unit can be chemically bonded to the moiety by any of various well-known chemical procedures. For example, when the moiety is a protein, the linkage can be achieved by a heterobifunctional crosslinking agent, e.g., SPDP, carbodiimide glutaraldehyde, etc. The moiety can be covalently linked or conjugated via a second reagent, such as a second antibody, protein A or a biotin-avidin complex. The paramagnetic moiety and the conjugation thereof to an antibody are well known in the art. See, for example, Miltenyi et al. (1990) Cytometry 11:231-238.

### Nucleic Acids

[0167] In one aspect, provided herein is an isolated polynucleotide encoding the antigen-binding unit of the present invention. Nucleotide sequences corresponding to various regions of the L or H chain of an existing antibody can be readily obtained and sequenced using conventional techniques including, but not limited to, hybridization, PCR, and DNA sequencing. The hybridoma cell producing a monoclonal antibody is used as a preferred source of an antibody nucleotide sequence. Large numbers of hybridoma cells producing a series of monoclonal antibodies may be obtained from a public or private repositories. The largest storage institution is the American Type Culture Collection, which provides a variety of well-characterized hybridoma cell lines. Alternatively, the antibody nucleotide can be obtained from an immunized or non-immunized rodent or human, and from an organ such as spleen and peripheral blood lymphocyte. Specific techniques suitable for extraction and synthesis of antibody nucleotides are described in Orlandi et al. (1989) Proc. Natl. Acad. Sci. U.S.A 86: 3833-3837; Larrick et al. (1989) biochem. Biophys. Res. Commun. 160: 1250-1255; Sastry et al. (1989) Proc. Natl. Acad. Sci., U.S.A. 86: 5728-5732; and U.S. Pat. No. 5,969,108.

[0168] The antibody nucleotide sequence can also be modified, for example, by substituting human heavy and light chain constant regions with coding sequences, to replace homologous non-human sequences. The chimeric antibody prepared in this manner retains the binding specificity of the original antibody.

[0169] In addition, the polynucleotide encoding the heavy chain and/or light chain of the antigen-binding unit can be subjected to codon optimization to achieve optimized expression of the antigen-binding unit of the subject in a desired host cell. For example, in one codon optimization method, a natural codon is substituted by the most common codon from the reference genome, wherein the translation rate of the codon for each amino acid is designed to be relatively high. Additional exemplary methods for generating a codon-optimized polynucleotide for expressing the desired protein are described in Kanaya et al., Gene, 238:143-155 (1999), Wang et al., Mol. Biol. Evol., 18(5):792-800 (2001), U.S. Pat. No. 5,795,737, US Publication No. 2008/0076161 and WO 2008/000632, and the methods can be applied to the heavy chain and/or light chain of the antigen-binding unit.

[0170] The polynucleotides of the present invention includes polynucleotides encoding a functional equivalent of the exemplary polypeptide and a fragment thereof.

[0171] Due to the degeneracy of the genetic code, there can be considerable variation in the nucleotides of the L and H sequences and a heterodimerization sequence suitable for construction of the polynucleotide and vector of the present invention. These variations are included in the present invention.

### Method of Treatment

[0172] Provided herein is a method for preventing or treating a novel coronavirus (SARS-CoV-2) infection in a subject by using the antigen-binding unit of the present invention, comprising administering to the subject the antigen-binding unit of the present invention.

[0173] Provided herein is a method for treating a disease, condition or disorder in a mammal using the antigen-binding unit of the present invention in combination with a second agent. The second agent can be administered with, before or after an antibody. The second agent may be an antiviral agent. The antiviral agent includes but is not limited to telaprevir, boceprevir, semiprevir, sofosbuvir, daclastavir, asunaprevir, lamivudine, adefovir, entecavir, tenofovir, telbivudine, interferon α and PEGylated interferon α. The second agent can be selected from hydroxychloroquine, chloroquine, favipiravir, Gimsilumab, AdCOVID (University of Alabama at Birmingham), AT-100 (Airway Therapeutics), TZLS-501 (Tiziana Life Sciences), OYA1 (OyaGen), BPI-002 (BeyondSpring), INO-4800 (Inovio Pharmaceutical), NP-120 (ifenprodil), remdesivir (GS-5734), Actemra (Roche), Galidesivir (BCX4430), SNG001 (Synairgen Research), or a combination thereof.

[0174] The second agent may be an agent for alleviating symptoms of a concurrent inflammatory condition in a subject. The anti-inflammatory agent includes non-steroidal anti-inflammatory drugs (NSAIDs) and corticosteroids. NSAID includes but is not limited to salicylate, such as acetylsalicylic acid; diflunisal, salicylic acid and salsalate; propionic acid derivative, such as ibuprofen; naproxen; dexibuprofen, dexketoprofen, flurbiprofen, oxaprozin, fenoprofen, loxoprofen, and ketoprofen; acetic acid derivative such as indomethacin, diclofenac, tolmetin, aceclofenac, sulindac, nabumetone, etodolac and ketorolac; enolic acid derivative such as piroxicam, lornoxicam, meloxicam, isoxicam, tenoxicam, phenylbutazone and droxicam; anthranilic acid derivative such as mefenamic acid, flufenamic acid, meclofenamic acid and tolfenamic acid; selective COX-2 inhibitor, such as celecoxib, lumiracoxib, rofecoxib, etoricoxib, valdecoxib, firocoxib, and parecoxib; sulfonanilide, such as nimesulide; and other non-steroidal anti-inflammatory drugs such as clonixin and licofelone. The corticosteroids include but are not limited to cortisone, dexamethasone, hydrocortisone, methylprednisolone, prednisone, and prednisolone.

[0175] The second agent may be an immunosuppressive agent. The immunosuppressive agent that can be used in combination with the antigen-binding unit includes but is not limited to hydroxychloroquine, sulfasalazine, leflunomide, etanercept, infliximab, adalimumab, D-penicillamine, oral gold compound, injectable gold compound (by intramuscular injection), minocycline, gold sodium thiomalate, auranofin, D-penicillamine, lobenzarit, bucillamine, actarit, cyclophosphamide, azathioprine, methotrexate, mizoribine, cyclosporin and tacrolimus.

[0176] The specific dose will vary depending on the specific antigen-binding unit selected, the dosing regimen to be followed, whether it is administered in combination with other agents, the time of administration, the tissue to which it is administered, and the physical delivery system carrying the specific antigen-binding unit. In some embodiments, during the treatment cycle, the antigen-binding unit is administered to the subject at a dose of about 1, 2, 3, 4, 5, 6, 7, 8, 9, 10, 11, 12, 13, 14, 15, 16, 17, 18, 19, 20, 21, 22, 23, 24, 25, 26, 27, 28, 29, 30, 31, 32, 34, 35, 36, 37, 38, 39, 40, 41, 42, 43, 44, 45, 46, 47, 48, 49, 50, 51, 52, 53, 54, 55, 56, 57, 58, 59, 60, 61, 62, 63, 64, 65, 66, 67, 68, 69 or 70 mg per week on average. For example, the antigen-binding unit is administered to the subject at a dose of about 35, 36, 37, 38, 39, 40, 41, 42, 43, 44, 45, 46, 47, 48, 49, 50, 51, 52, 53, 54 or 55 mg per week. In some embodiments, the antigen-binding unit is administered to the subject at a dose of about 40, 41, 42, 43, 44, 45, 46, 47, 48, 49, 50, 51, 52, 53, 54 or 55 mg per week.

[0177] During the treatment cycle, the antigen-binding unit can be administered to the subject at a dose of greater than 1, 1.5, 2, 2.5, 3, 3.5, 4, 4.5, 5, 5.5, 6, 6.5, 7, 7.5, 8, 8.5, 9, 9.5 or 10 mg per day on average. For example, during the treatment cycle, the antigen-binding unit is administered to the subject at a dose of about 6 to 10 mg, about 6.5 to 9.5 mg, about 6.5 to 8.5 mg, about 6.5 to 8 mg, or about 7 to 9 mg per day on average.

[0178] The dose of the antigen-binding unit can be about, at least about, or at most about 0.1, 0.5, 1, 2, 3, 4, 5, 6, 7, 8, 9, 10, 15, 20, 25, 30, 35, 40, 45, 50, 55, 60, 65, 70, 75, 80, 85, 90, 95, 100, 125, 150, 175, 200, 225, 250, 275, 300, 325, 350, 375, 400, 425, 450, 475, 500, 525, 550, 575, 600, 625, 650, 675, 700, 725, 750, 775, 800, 825, 850, 875, 900, 925, 950, 975, 1000 mg or mg/kg, or any range derived therefrom. It is contemplated that the dose in mg/kg refers to the amount of the antigen-binding unit in mg per kilogram of the total body weight of the subject. It is contemplated that when multiple doses are administered to a patient, the doses can vary in amount or can be the same.

### Pharmaceutical Composition

[0179] Provided herein is a pharmaceutical composition comprising a subject antibody or a functional fragment thereof and a pharmaceutically acceptable carrier, excipient or stabilizer, including, but not limited to, an inert solid diluent and a filler, a diluent, a sterile aqueous solution and various organic solvents, a penetration enhancer, a solubilizer and an adjuvant. (Remington's Pharmaceutical Sciences 16th edition, Osol, A. Ed. (1980)).

[0180] The pharmaceutical composition can be in a unit dosage form suitable for single administration at a precise dose. The pharmaceutical composition can further comprise an antigen-binding unit as an active ingredient, and may include a conventional pharmaceutical carrier or excipient. In addition, it may include other drugs or agents, carriers, adjuvants, etc. An exemplary parenteral administration form includes a solution or suspension of an active polypeptide and/or PEG-modified polypeptide in a sterile aqueous solution, such as aqueous propylene glycol or dextrose solution. If desired, such dosage forms can be suitably buffered with a salt such as histidine and/or phosphate.

[0181] The composition can further include one or more pharmaceutically acceptable additives and excipients. These additives and excipients include but are not limited to an anti-adhesive agent, an anti-foaming agent, a buffer, a polymer, an antioxidant, a preservative, a chelating agent, a viscomodulator, a tension regulator, a flavoring agent, a colorant, a flavor enhancer, an opacifier, a suspending agent, a binder, a filler, a plasticizer, a lubricant and a mixture thereof.

### Kit

[0182] The kit of the present invention comprises the antigen-binding unit of the present invention or a conjugate thereof of the present invention. Further provided is the use of the antigen-binding unit of the present invention in the preparation of a kit, wherein the kit is used for detecting presence of a novel coronavirus, an S protein thereof or a RBD of the S protein, or a level thereof in a sample, or for diagnosing whether a subject is infected with the novel coronavirus.

[0183] In some embodiments, the sample includes, but is not limited to, an excrement, an oral or nasal secretion, an alveolar lavage fluid, etc. from a subject (e.g., mammal, preferably human).

[0184] General methods for detecting presence of a target virus or antigen (e.g., a novel coronavirus, or an S protein thereof or a RBD of the S protein) or a level thereof in a sample by using an antibody or an antigen-binding fragment thereof is well known to a person skilled in the art. In some embodiments, the detection method may involve enzyme linked immunosorbent assay (ELISA), enzyme immunodetection, chemiluminescence immunodetection, radioimmunodetection, fluorescence immunodetection, immunochromatography, a competition method, and a similar detection method.

### EXAMPLES

[0185] The present invention is described with reference to the following examples, which are meant to illustrate the present invention (but not limit the present invention).

[0186] Unless specifically stated, the molecular biology experimental methods and immunodetection methods used in the present invention were basically carried out with reference to J. Sambrook et al., Molecular Cloning: A Laboratory Manual, 2nd Edition, Cold Spring Harbor Laboratory Press, 1989 and F. M. Ausubel et al., Short Protocols in Molecular Biology, 3rd Edition, John Wiley & Sons, Inc., 1995; and restriction enzymes were used under the conditions as recommended by the product manufacturer. If no specific conditions are indicated in the examples, conventional conditions or the conditions suggested by the manufacturer shall be followed. The reagents or instruments used without indicating the manufacturers are commercially available conventional products. It is known to a person skilled in the art that the examples illustrate the present invention by way of example and are not intended to limit the claimed scope of the present invention.

### Example 1: Isolation of Memory B Cell

[0187] Blood was collected from people once infected with SARS-CoV-2 virus but recovered and discharged (provided by Beijing Youan Hospital), and PBMCs were extracted using STEMCELL SepMate™-15 (Stemcell Technologies, Cat #86415) in a Biosafety Physical Containment Level-2+ Laboratory. Then, memory B cells were enriched from the extracted PBMCs using STEMCELL EasySep Human Memory B Cell Isolation Kit (Stemcell Technologies, Cat #17864) according to the manufacturer's instructions.

### Example 2: Acquisition and Identification of Sequence of Antigen-Binding Unit

[0188] Single-cell transcriptome VDJ sequencing of the above-mentioned enriched memory B cells was performed using Chromium Single Cell V(D)J Reagent Kits (purchased from 10× genomics, Cat #100006) according to the manufacturer's instructions. The sequencing results were analyzed, and 360 antigen-binding units were obtained and named as ABU 1-395. The sequence information of the obtained antigen-binding units is as shown in Table 1 below.

TABLE 1
Exemplary antigen-binding units obtained herein

| ABU No. | VH SEQ ID No. | VL SEQ ID NO. |
|---|---|---|
| ABU-1 | 721 | 1081 |
| ABU-2 | 722 | 1082 |
| ABU-3 | 723 | 1083 |
| ABU-4 | 724 | 1084 |
| ABU-5 | 725 | 1085 |
| ABU-6 | 726 | 1086 |
| ABU-7 | 727 | 1087 |
| ABU-8 | 728 | 1088 |
| ABU-9 | 729 | 1089 |
| ABU-10 | 730 | 1090 |
| ABU-11 | 731 | 1091 |
| ABU-12 | 732 | 1092 |
| ABU-13 | 733 | 1093 |
| ABU-14 | 734 | 1094 |
| ABU-15 | 735 | 1095 |
| ABU-16 | 736 | 1096 |
| ABU-17 | 737 | 1097 |
| ABU-18 | 738 | 1098 |
| ABU-19 | 739 | 1099 |
| ABU-20 | 740 | 1100 |
| ABU-21 | 741 | 1101 |
| ABU-22 | 742 | 1102 |
| ABU-23 | 743 | 1103 |
| ABU-24 | 744 | 1104 |
| ABU-25 | 745 | 1105 |
| ABU-26 | 746 | 1106 |
| ABU-27 | 747 | 1107 |
| ABU-28 | 748 | 1108 |
| ABU-29 | 749 | 1109 |
| ABU-30 | 750 | 1110 |
| ABU-31 | 751 | 1111 |
| ABU-32 | 752 | 1112 |
| ABU-33 | 753 | 1113 |
| ABU-34 | 754 | 1114 |
| ABU-35 | 755 | 1115 |
| ABU-36 | 756 | 1116 |
| ABU-37 | 757 | 1117 |
| ABU-38 | 758 | 1118 |
| ABU-39 | 759 | 1119 |
| ABU-40 | 760 | 1120 |
| ABU-41 | 761 | 1121 |
| ABU-42 | 762 | 1122 |
| ABU-43 | 763 | 1123 |
| ABU-44 | 764 | 1124 |
| ABU-45 | 765 | 1125 |
| ABU-46 | 766 | 1126 |
| ABU-47 | 767 | 1127 |
| ABU-48 | 768 | 1128 |
| ABU-49 | 769 | 1129 |
| ABU-50 | 770 | 1130 |
| ABU-51 | 771 | 1131 |
| ABU-52 | 772 | 1132 |
| ABU-53 | 773 | 1133 |
| ABU-54 | 774 | 1134 |
| ABU-55 | 775 | 1135 |
| ABU-56 | 776 | 1136 |
| ABU-57 | 777 | 1137 |
| ABU-58 | 778 | 1138 |
| ABU-59 | 779 | 1139 |
| ABU-60 | 780 | 1140 |
| ABU-61 | 781 | 1141 |
| ABU-62 | 782 | 1142 |
| ABU-63 | 783 | 1143 |
| ABU-64 | 784 | 1144 |
| ABU-65 | 785 | 1145 |
| ABU-66 | 786 | 1146 |
| ABU-67 | 787 | 1147 |
| ABU-68 | 788 | 1148 |
| ABU-69 | 789 | 1149 |
| ABU-70 | 790 | 1150 |
| ABU-71 | 791 | 1151 |
| ABU-72 | 792 | 1152 |
| ABU-73 | 793 | 1153 |
| ABU-74 | 794 | 1154 |
| ABU-75 | 795 | 1155 |
| ABU-76 | 796 | 1156 |
| ABU-77 | 797 | 1157 |
| ABU-78 | 798 | 1158 |
| ABU-79 | 799 | 1159 |
| ABU-80 | 800 | 1160 |
| ABU-81 | 801 | 1161 |
| ABU-82 | 802 | 1162 |
| ABU-83 | 803 | 1163 |
| ABU-84 | 804 | 1164 |
| ABU-85 | 805 | 1165 |
| ABU-86 | 806 | 1166 |
| ABU-87 | 807 | 1167 |
| ABU-88 | 808 | 1168 |
| ABU-89 | 809 | 1169 |
| ABU-90 | 810 | 1170 |
| ABU-91 | 811 | 1171 |
| ABU-92 | 812 | 1172 |
| ABU-93 | 813 | 1173 |
| ABU-94 | 814 | 1174 |
| ABU-95 | 815 | 1175 |
| ABU-96 | 816 | 1176 |
| ABU-97 | 817 | 1177 |
| ABU-98 | 818 | 1178 |
| ABU-99 | 819 | 1179 |
| ABU-100 | 820 | 1180 |
| ABU-101 | 821 | 1181 |
| ABU-102 | 822 | 1182 |
| ABU-103 | 823 | 1183 |
| ABU-104 | 824 | 1184 |
| ABU-105 | 825 | 1185 |
| ABU-106 | 826 | 1186 |
| ABU-107 | 827 | 1187 |
| ABU-108 | 828 | 1188 |
| ABU-109 | 829 | 1189 |
| ABU-110 | 830 | 1190 |
| ABU-111 | 831 | 1191 |
| ABU-112 | 832 | 1192 |
| ABU-113 | 833 | 1193 |
| ABU-114 | 834 | 1194 |
| ABU-115 | 835 | 1195 |
| ABU-116 | 836 | 1196 |
| ABU-117 | 837 | 1197 |
| ABU-118 | 838 | 1198 |
| ABU-119 | 839 | 1199 |
| ABU-120 | 840 | 1200 |
| ABU-121 | 841 | 1201 |
| ABU-122 | 842 | 1202 |
| ABU-123 | 843 | 1203 |
| ABU-124 | 844 | 1204 |
| ABU-125 | 845 | 1205 |
| ABU-126 | 846 | 1206 |
| ABU-127 | 847 | 1207 |
| ABU-128 | 848 | 1208 |
| ABU-129 | 849 | 1209 |
| ABU-130 | 850 | 1210 |
| ABU-131 | 851 | 1211 |
| ABU-132 | 852 | 1212 |
| ABU-133 | 853 | 1213 |
| ABU-134 | 854 | 1214 |
| ABU-135 | 855 | 1215 |
| ABU-136 | 856 | 1216 |
| ABU-137 | 857 | 1217 |
| ABU-138 | 858 | 1218 |
| ABU-139 | 859 | 1219 |
| ABU-140 | 860 | 1220 |
| ABU-141 | 861 | 1221 |
| ABU-142 | 862 | 1222 |
| ABU-143 | 863 | 1223 |
| ABU-144 | 864 | 1224 |
| ABU-145 | 865 | 1225 |
| ABU-146 | 866 | 1226 |
| ABU-147 | 867 | 1227 |
| ABU-148 | 868 | 1228 |
| ABU-149 | 869 | 1229 |
| ABU-150 | 870 | 1230 |
| ABU-151 | 871 | 1231 |
| ABU-152 | 872 | 1232 |
| ABU-153 | 873 | 1233 |
| ABU-154 | 874 | 1234 |
| ABU-155 | 875 | 1235 |
| ABU-156 | 876 | 1236 |
| ABU-157 | 877 | 1237 |
| ABU-158 | 878 | 1238 |
| ABU-159 | 879 | 1239 |
| ABU-160 | 880 | 1240 |
| ABU-161 | 881 | 1241 |
| ABU-162 | 882 | 1242 |
| ABU-163 | 883 | 1243 |
| ABU-164 | 884 | 1244 |
| ABU-165 | 885 | 1245 |
| ABU-166 | 886 | 1246 |
| ABU-167 | 887 | 1247 |
| ABU-168 | 888 | 1248 |
| ABU-169 | 889 | 1249 |
| ABU-170 | 890 | 1250 |
| ABU-171 | 891 | 1251 |
| ABU-172 | 892 | 1252 |
| ABU-173 | 893 | 1253 |
| ABU-174 | 894 | 1254 |
| ABU-175 | 895 | 1255 |
| ABU-176 | 896 | 1256 |
| ABU-177 | 897 | 1257 |
| ABU-178 | 898 | 1258 |
| ABU-179 | 899 | 1259 |
| ABU-180 | 900 | 1260 |
| ABU-181 | 901 | 1261 |
| ABU-182 | 902 | 1262 |
| ABU-183 | 903 | 1263 |
| ABU-184 | 904 | 1264 |
| ABU-185 | 905 | 1265 |
| ABU-186 | 906 | 1266 |
| ABU-187 | 907 | 1267 |
| ABU-188 | 908 | 1268 |
| ABU-189 | 909 | 1269 |
| ABU-190 | 910 | 1270 |
| ABU-191 | 911 | 1271 |
| ABU-192 | 912 | 1272 |
| ABU-193 | 913 | 1273 |
| ABU-194 | 914 | 1274 |
| ABU-195 | 915 | 1275 |
| ABU-196 | 916 | 1276 |
| ABU-197 | 917 | 1277 |
| ABU-198 | 918 | 1278 |
| ABU-199 | 919 | 1279 |
| ABU-200 | 920 | 1280 |
| ABU-201 | 921 | 1281 |
| ABU-202 | 922 | 1282 |
| ABU-203 | 923 | 1283 |
| ABU-204 | 924 | 1284 |
| ABU-205 | 925 | 1285 |
| ABU-206 | 926 | 1286 |
| ABU-207 | 927 | 1287 |
| ABU-208 | 928 | 1288 |
| ABU-209 | 929 | 1289 |
| ABU-210 | 930 | 1290 |
| ABU-211 | 931 | 1291 |
| ABU-212 | 932 | 1292 |
| ABU-213 | 933 | 1293 |
| ABU-214 | 934 | 1294 |
| ABU-215 | 935 | 1295 |
| ABU-216 | 936 | 1296 |
| ABU-217 | 937 | 1297 |
| ABU-218 | 938 | 1298 |
| ABU-219 | 939 | 1299 |
| ABU-220 | 940 | 1300 |
| ABU-221 | 941 | 1301 |
| ABU-222 | 942 | 1302 |
| ABU-223 | 943 | 1303 |
| ABU-224 | 944 | 1304 |
| ABU-225 | 945 | 1305 |
| ABU-226 | 946 | 1306 |
| ABU-227 | 947 | 1307 |
| ABU-228 | 948 | 1308 |
| ABU-229 | 949 | 1309 |
| ABU-230 | 950 | 1310 |
| ABU-231 | 951 | 1311 |
| ABU-232 | 952 | 1312 |
| ABU-233 | 953 | 1313 |
| ABU-234 | 954 | 1314 |
| ABU-235 | 955 | 1315 |
| ABU-236 | 956 | 1316 |
| ABU-237 | 957 | 1317 |
| ABU-238 | 958 | 1318 |
| ABU-239 | 959 | 1319 |
| ABU-240 | 960 | 1320 |
| ABU-241 | 961 | 1321 |
| ABU-242 | 962 | 1322 |
| ABU-243 | 963 | 1323 |
| ABU-244 | 964 | 1324 |
| ABU-245 | 965 | 1325 |
| ABU-246 | 966 | 1326 |
| ABU-247 | 967 | 1327 |
| ABU-248 | 968 | 1328 |
| ABU-249 | 969 | 1329 |
| ABU-250 | 970 | 1330 |
| ABU-251 | 971 | 1331 |
| ABU-252 | 972 | 1332 |
| ABU-253 | 973 | 1333 |
| ABU-254 | 974 | 1334 |
| ABU-255 | 975 | 1335 |
| ABU-256 | 976 | 1336 |
| ABU-257 | 977 | 1337 |
| ABU-258 | 978 | 1338 |
| ABU-259 | 979 | 1339 |
| ABU-260 | 980 | 1340 |
| ABU-261 | 981 | 1341 |
| ABU-262 | 982 | 1342 |
| ABU-263 | 983 | 1343 |
| ABU-264 | 984 | 1344 |
| ABU-265 | 985 | 1345 |
| ABU-266 | 986 | 1346 |
| ABU-267 | 987 | 1347 |
| ABU-268 | 988 | 1348 |
| ABU-269 | 989 | 1349 |
| ABU-270 | 990 | 1350 |
| ABU-271 | 991 | 1351 |
| ABU-272 | 992 | 1352 |
| ABU-273 | 993 | 1353 |
| ABU-274 | 994 | 1354 |
| ABU-275 | 995 | 1355 |
| ABU-276 | 996 | 1356 |
| ABU-277 | 997 | 1357 |
| ABU-278 | 998 | 1358 |
| ABU-279 | 999 | 1359 |
| ABU-280 | 1000 | 1360 |
| ABU-281 | 1001 | 1361 |
| ABU-282 | 1002 | 1362 |
| ABU-283 | 1003 | 1363 |
| ABU-284 | 1004 | 1364 |
| ABU-285 | 1005 | 1365 |
| ABU-286 | 1006 | 1366 |
| ABU-287 | 1007 | 1367 |
| ABU-288 | 1008 | 1368 |
| ABU-289 | 1009 | 1369 |
| ABU-290 | 1010 | 1370 |
| ABU-291 | 1011 | 1371 |
| ABU-292 | 1012 | 1372 |
| ABU-293 | 1013 | 1373 |
| ABU-294 | 1014 | 1374 |
| ABU-295 | 1015 | 1375 |
| ABU-296 | 1016 | 1376 |
| ABU-297 | 1017 | 1377 |
| ABU-298 | 1018 | 1378 |
| ABU-299 | 1019 | 1379 |
| ABU-300 | 1020 | 1380 |
| ABU-301 | 1021 | 1381 |
| ABU-302 | 1022 | 1382 |
| ABU-303 | 1023 | 1383 |
| ABU-304 | 1024 | 1384 |
| ABU-305 | 1025 | 1385 |
| ABU-306 | 1026 | 1386 |
| ABU-307 | 1027 | 1387 |
| ABU-308 | 1028 | 1388 |
| ABU-309 | 1029 | 1389 |
| ABU-310 | 1030 | 1390 |
| ABU-311 | 1031 | 1391 |
| ABU-312 | 1032 | 1392 |
| ABU-313 | 1033 | 1393 |
| ABU-314 | 1034 | 1394 |
| ABU-315 | 1035 | 1395 |
| ABU-316 | 1036 | 1396 |
| ABU-317 | 1037 | 1397 |
| ABU-318 | 1038 | 1398 |
| ABU-319 | 1039 | 1399 |
| ABU-320 | 1040 | 1400 |
| ABU-321 | 1041 | 1401 |
| ABU-322 | 1042 | 1402 |
| ABU-323 | 1043 | 1403 |
| ABU-324 | 1044 | 1404 |
| ABU-325 | 1045 | 1405 |
| ABU-326 | 1046 | 1406 |
| ABU-327 | 1047 | 1407 |
| ABU-328 | 1048 | 1408 |
| ABU-329 | 1049 | 1409 |
| ABU-330 | 1050 | 1410 |
| ABU-331 | 1051 | 1411 |
| ABU-332 | 1052 | 1412 |
| ABU-333 | 1053 | 1413 |
| ABU-334 | 1054 | 1414 |
| ABU-335 | 1055 | 1415 |
| ABU-336 | 1056 | 1416 |
| ABU-337 | 1057 | 1417 |
| ABU-338 | 1058 | 1418 |
| ABU-339 | 1059 | 1419 |
| ABU-340 | 1060 | 1420 |
| ABU-341 | 1061 | 1421 |
| ABU-342 | 1062 | 1422 |
| ABU-343 | 1063 | 1423 |
| ABU-344 | 1064 | 1424 |
| ABU-345 | 1065 | 1425 |
| ABU-346 | 1066 | 1426 |
| ABU-347 | 1067 | 1427 |
| ABU-348 | 1068 | 1428 |
| ABU-349 | 1069 | 1429 |
| ABU-350 | 1070 | 1430 |
| ABU-351 | 1071 | 1431 |
| ABU-352 | 1072 | 1432 |
| ABU-353 | 1073 | 1433 |
| ABU-354 | 1074 | 1434 |
| ABU-355 | 1075 | 1435 |
| ABU-356 | 1076 | 1436 |
| ABU-357 | 1077 | 1437 |
| ABU-358 | 1078 | 1438 |
| ABU-359 | 1079 | 1439 |
| ABU-360 | 1080 | 1440 |
| ABU-361 | 3111 | 3146 |
| ABU-362 | 3112 | 3147 |
| ABU-363 | 3113 | 3148 |
| ABU-364 | 3114 | 3149 |
| ABU-365 | 3115 | 3150 |
| ABU-366 | 3116 | 3151 |
| ABU-367 | 3117 | 3152 |
| ABU-368 | 3118 | 3153 |
| ABU-369 | 3119 | 3154 |
| ABU-370 | 3120 | 3155 |
| ABU-371 | 3121 | 3156 |
| ABU-372 | 3122 | 3157 |
| ABU-373 | 3123 | 3158 |
| ABU-374 | 3124 | 3159 |
| ABU-375 | 3125 | 3160 |
| ABU-376 | 3126 | 3161 |
| ABU-377 | 3127 | 3162 |
| ABU-378 | 3128 | 3163 |
| ABU-379 | 3129 | 3164 |
| ABU-380 | 3130 | 3165 |
| ABU-381 | 3131 | 3166 |
| ABU-382 | 3132 | 3167 |
| ABU-383 | 3133 | 3168 |
| ABU-384 | 3134 | 3169 |
| ABU-385 | 3135 | 3170 |
| ABU-386 | 3136 | 3171 |
| ABU-387 | 3137 | 3172 |
| ABU-388 | 3138 | 3173 |
| ABU-389 | 3139 | 3174 |
| ABU-390 | 3140 | 3175 |
| ABU-391 | 3141 | 3176 |
| ABU-392 | 3142 | 3177 |
| ABU-393 | 3143 | 3178 |
| ABU-394 | 3144 | 3179 |
| ABU-395 | 3145 | 3180 |

### Example 3: Preparation and Purification of Antigen-Binding Unit of the Present Invention

[0189] According to the sequence information of the antigen-binding units obtained in example 2, Sino Biological Inc. was entrusted to express and purify the obtained antigen-binding units, and the antigenic reactivity thereof was detected.

[0190] In short, nucleic acid molecules encoding the heavy and light chains of the antibody were synthesized in vitro and then cloned into expression vectors, respectively, thereby obtaining recombinant expression vectors encoding the heavy and light chains of the antibody, respectively. HEK293 cells were co-transfected with the above-mentioned recombinant expression vectors encoding the heavy and light chains of the antibody, respectively. 4-6 hours after the transfection, the cell culture solution was changed to a serum-free medium, which was cultured at 37° C. for another 6 days. After cultivation, the antibody protein expressed by the cells was purified from the culture by an affinity purification column. Then, the purified protein of interest was detected by reducing and non-reducing SDS-PAGE. By taking ABU-174, ABU-175 and ABU190 as examples, the electrophoresis results thereof after preparation are shown in FIGS. 1A-1C, respectively. The results show that the purities of purified ABU-174, ABU-175 and ABU190 are 95.9%, 96.4% and 98.2%, respectively.

[0191] Then, the antigenic reactivity of the purified antibody to be detected was detected by ELISA experiments using the RBD of the recombinantly expressed S protein as a coating antigen and using Goat anti-human IgG Fc labeled with horseradish peroxidase (HRP) as a secondary antibody. In short, a 96-well plate was coated with the RBD of the recombinantly expressed S protein (with an amino acid sequence as shown in SEQ ID NO: 1459 and at a concentration of 0.01 μg/ml or 1 μg/ml), and then the 96-well plate was blocked with a blocking solution. Then, the monoclonal antibodies to be detected (a control antibody, ABU-174, ABU-175 and ABU190; each at a concentration of 0.1 μg/ml) were added and incubated, respectively. After the plate was washed with an ELISA washing liquid, Goat anti-human IgG Fc labeled with horseradish peroxidase (HRP) was added as a secondary antibody (diluted at 1:500); and the plate was again incubated. Then, the ELISA plate was washed with PBST, and a color developing agent was added to develop the color. Then, the absorbance at OD450 nm was read on a microplate reader. The results are as shown in Table 2. It can be seen from Table 2 that ABU-174, ABU-175 and ABU190 can specifically recognize and bind to RBD of S protein.

TABLE 2
Reactivity of antigen-binding units of ABU-174, ABU-175 and ABU190
with RBD of S protein detected by ELISA (OD450 reading)

Concentration of RBD protein

| Sample to be detected | 0.01 μg/ml | 1 μg/ml |
|---|---|---|
| Irrelevant antibody (1 ug/ml) | 0.006 | 0.025 |
| ABU-174 (1 ug/ml) | 1.261 | 2.909 |
| ABU-175 (1 ug/ml) | 2.274 | 2.963 |
| ABU190 (1 ug/ml) | 0.288 | 3.057 |

### Example 4: Evaluation of Binding Ability of Antigen-Binding Unit of the Present Invention to S Protein

[0192] In the example, surface plasmon resonance (SPR) was used to detect the affinity of the antibody to the RBD region of the Spike protein. Biacore T200 was used for measurement. The biotin-labeled SARS-COV-2 RBD domain was first coupled to the SA chip (GE), and the RU value of the signal resonance unit was increased by 100 units. The running buffer was PBS at PH 7.4 plus 0.005% P20, ensuring that the buffer in the analyte (such as antibody) was the same as the running buffer. The purified antibody was subjected to 3-fold gradient dilution to a concentration between 50-0.78125 nM. The measurement results were analyzed using Biacore Evaluation software, all the curves were fitted to a 1:1 model to obtain the rate constant Ka for the binding of the antibody to the antigen and the rate constant Kd for the dissociation of the antibody from the antibody/antigen complex, and the dissociation equilibrium constant KD was calculated, wherein KD=Kd/Ka. The results are shown in Table 3 below.

[0193] The binding affinity of the exemplary antigen-binding unit of the present invention for the RBD region of the Spike protein is listed in Table 3, wherein the KD value of each antigen-binding unit is less than 20 nM.

TABLE 3
KD value of the binding affinity of the exemplary antigen-binding
unit of the present invention for the RBD region of Spike protein

| AUB No. | KD (Kd/Ka, nM) |
|---|---|
| ABU-145 | <10 |
| ABU-149 | <10 |
| ABU-174 | <1 |
| ABU-175 | <1 |
| ABU-181 | <10 |
| ABU-190 | <10 |
| ABU-205 | <10 |
| ABU-207 | <10 |
| ABU-208 | <1 |
| ABU-210 | <10 |
| ABU-211 | <20 |
| ABU-254 | <10 |
| ABU-257 | <10 |
| ABU-258 | <1 |
| ABU-288 | <1 |
| ABU-289 | <10 |
| ABU-290 | <1 |
| ABU-291 | <1 |
| ABU-296 | <1 |
| ABU-297 | <1 |
| ABU-298 | <20 |
| ABU-305 | <20 |
| ABU-308 | <10 |
| ABU-312 | <20 |
| ABU-316 | <10 |
| ABU-317 | <20 |
| ABU-319 | <10 |
| ABU-320 | <10 |
| ABU-322 | <1 |
| ABU-323 | <20 |
| ABU-325 | <10 |
| ABU-327 | <20 |
| ABU-328 | <10 |
| ABU-329 | <10 |
| ABU-330 | <10 |
| ABU-337 | <20 |
| ABU-339 | <20 |
| ABU-340 | <10 |
| ABU-341 | <10 |
| ABU-343 | <20 |
| ABU-344 | <1 |
| ABU-346 | <10 |
| ABU-348 | <10 |
| ABU-349 | <1 |
| ABU-351 | <10 |
| ABU-352 | <10 |
| ABU-354 | <1 |
| ABU-355 | <1 |
| ABU-356 | <10 |
| ABU-357 | <10 |
| ABU-358 | <10 |
| ABU-359 | <10 |
| ABU-360 | <1 |
| ABU-361 | <20 |
| ABU-362 | <20 |
| ABU-365 | <10 |
| ABU-367 | <1 |
| ABU-368 | <20 |
| ABU-369 | <10 |
| ABU-371 | <20 |
| ABU-372 | <20 |
| ABU-373 | <10 |
| ABU-375 | <10 |
| ABU-376 | <10 |
| ABU-377 | <10 |
| ABU-379 | <10 |
| ABU-380 | <1 |
| ABU-381 | <1 |
| ABU-382 | <10 |
| ABU-383 | <20 |
| ABU-384 | <20 |
| ABU-385 | <20 |
| ABU-386 | <10 |
| ABU-390 | <10 |
| ABU-391 | <20 |
| ABU-392 | <10 |
| ABU-393 | <20 |
| ABU-394 | <20 |
| ABU-395 | <10 |

[0194] FIGS. 2A-2E further exemplarily show the binding affinity of ABU-174, ABU-175, ABU190, ABU297 and ABU367 for the RBD region of the Spike protein. It can be seen from FIGS. 2A-2E that ABU-174 has a KD value of 0.29 nM, ABU-175 has a KD value of 0.039 nM, ABU190 has a KD value of 2.8 nM, ABU297 has a KD value of 0.824 nM, and ABU has a KD value of 0.18 nM. FIGS. 2A-2E show that ABU-174, ABU-175, ABU190, ABU297 and ABU367 all have good affinity for the S protein of the novel coronavirus.

### Example 5: Evaluation of Ability of Antigen-Binding Unit of the Present Invention to Neutralize SARS-CoV-2 Pseudovirus

[0195] In this example, the cell microneutralization assay was used to detect the neutralizing activity of the antigen-binding unit of the present invention against SARS-CoV-2 pseudovirus with reference to the description of Temperton N J et al., Emerg Infect Dis, 2005, 11(3), 411-416. The SARS-CoV-2 pseudovirus used in this example was provided by China National Institutes for Food and Drug Control, has similar cell infection characteristics to the euvirus, can be used to simulate the early process of euvirus infection of a cell, and carries reporter gene luciferase, which can be quickly and easily detected and analyzed. The safety for operating the pseudovirus is high, and the neutralization experiment can be completed in Biosafety Physical Containment Level-2 Laboratory to detect the neutralization activity (Neutralization titer) of the antibody. The specific steps of the experiment method are as follows:

### 1. Reagent for Equilibration

[0196] The reagent (0.25% trypsin-EDTA, DMEM complete medium) stored at 2° C.-8° C. was taken out and equilibrated at room temperature for more than 30 minutes.

### 2. Experimental Operation

[0197] (1) A 96-well plate was taken, and the arrangement of the samples was set up as shown in Table 4; A2-H2 wells were set as cell control wells (CC), which only contain experimental cells; A3-H3 wells were set as virus control wells (VV), which contain experimental cells and pseudovirus; A4-A11, B4-B11, C4-C11, D4-D11, E4-E11, F4-F11, G4-G11 and H4-H11 wells were set as experimental wells, which contain experimental cells, pseudovirus and different concentrations of antibody to be detected; and other wells were set as blank. The experimental cells and pseudovirus used in this example were Huh-7 cells and SARS-CoV-2 virus (both provided by China National Institutes for Food and Drug Control), respectively.

TABLE 4
Arrangement of samples in 96-well plate

| | 1 | 2 | 3 | 4 | 5-10 | 11 | 12 |
|---|---|---|---|---|---|---|---|
| A | — | CC | VV | Dilution 1 | Dilution 1 | Dilution 1 | — |
| B | — | CC | VV | Dilution 2 | Dilution 2 | Dilution 2 | — |
| C | — | CC | VV | Dilution 3 | Dilution 3 | Dilution 3 | — |
| D | — | CC | VV | Dilution 4 | Dilution 4 | Dilution 4 | — |
| E | — | CC | VV | Dilution 5 | Dilution 5 | Dilution 5 | — |
| F | — | CC | VV | Dilution 6 | Dilution 6 | Dilution 6 | — |
| G | — | CC | VV | Dilution 7 | Dilution 7 | Dilution 7 | — |
| H | — | CC | VV | Dilution 8 | Dilution 8 | Dilution 8 | — |

[0198] (2) DMEM complete mediums (containing 1% antibiotic, 25 mM HEPES, 10% FBS) were added at 100 μl/well to the cell control wells; DMEM complete mediums were added at 100 μl/well to the virus control wells; and the indicated concentration of the antibody to be detected diluted in DMEM complete mediums was added to the experimental wells at 50 μl/well. The antibody concentrations of dilutions 1-8 used in Table 4 were 1/30 μg/μl, 1/90 μg/μl, 1/270 μg/μl, 1/810 μg/μl, 1/2430 μg/μl, 1/7290 μg/μl, 1/21870 μg/μl, and 1/65610 μg/μl, respectively.

[0199] (3) The SARS-CoV-2 pseudovirus was diluted to about 1.3×10⁴/ml (TCID50) with DMEM complete mediums; and then, the SARS-CoV-2 pseudovirus was added at 50 μl/well to the virus control wells and the experimental wells.

[0200] (4) The 96-well plate was placed in a cell incubator (37° C., 5% CO₂) and incubated for 1 hour.

[0201] (5) The pre-cultured Huh-7 cells were diluted to 2×10⁵ cells/ml with DMEM complete mediums. After the incubation in the previous step, cells were added at 100 μl/well to the cell control wells, virus control wells and experimental wells.

[0202] (6) The 96-well plate was placed in a cell incubator (37° C., 5% CO₂) and cultured for 20-28 hours.

[0203] (7) The 96-well plate was taken out from the cell incubator; 150 μl of the supernatant was aspirated from each well and discarded; and then 100 μl of luciferase detection reagents were added, and reacted at room temperature for 2 minutes in the dark.

[0204] (8) After the reaction was completed, the liquid in each well was pipetted 6 to 8 times repeatedly using a pipette until the cells were fully lysed. Then, 150 μl of liquid was aspirated from each well and transferred to the corresponding 96-well chemiluminescence detection plate, and the luminescence value was read with a chemiluminescence detector (Perkinelmer EnSight multimode microplate reader).

[0205] (9) Calculation of neutralization inhibition rate:

Inhibition rate=[1−(mean luminescence intensity of experimental wells−mean luminescence intensity of CC wells)/(mean luminescence intensity of VV wells−mean luminescence intensity of CC wells)]×100%.

[0206] (10) IC₅₀ of the antibody to be detected was calculated by Reed-Muench method according to the result of the neutralization inhibition rate.

[0207] Table 5 lists IC₅₀ of the exemplary antigen-binding unit of the present invention for neutralizing SARS-CoV-2 pseudovirus, wherein the IC₅₀ value of each antigen-binding unit is less than 1 μg/ml.

TABLE 5
IC50 of exemplary antigen-binding unit of the present
invention for neutralizing SARS-CoV-2 pseudovirus

| ABU No. | IC50 (μg/ml) |
|---|---|
| ABU-174 | <0.1 |
| ABU-175 | <0.1 |
| ABU-190 | <0.1 |
| ABU-207 | <0.5 |
| ABU-208 | <0.5 |
| ABU-257 | <0.5 |
| ABU-290 | <0.1 |
| ABU-291 | <0.5 |
| ABU-296 | <0.1 |
| ABU-297 | <0.1 |
| ABU-308 | <0.5 |
| ABU-322 | <0.1 |
| ABU-340 | <0.5 |
| ABU-341 | <0.1 |
| ABU-344 | <1 |
| ABU-349 | <0.1 |
| ABU-351 | <0.1 |
| ABU-352 | <0.1 |
| ABU-354 | <0.1 |
| ABU-355 | <0.1 |
| ABU-356 | <0.1 |
| ABU-357 | <1 |
| ABU-358 | <0.1 |
| ABU-359 | <0.1 |
| ABU-360 | <0.1 |
| ABU-361 | <0.5 |
| ABU-362 | <0.5 |
| ABU-365 | <0.1 |
| ABU-367 | <0.1 |
| ABU-368 | <0.5 |
| ABU-369 | <0.1 |
| ABU-371 | <1 |
| ABU-372 | <0.5 |
| ABU-373 | <0.5 |
| ABU-375 | <0.1 |
| ABU-376 | <0.1 |
| ABU-377 | <0.5 |
| ABU-379 | <0.5 |
| ABU-380 | <0.1 |
| ABU-381 | <0.1 |
| ABU-382 | <0.1 |
| ABU-386 | <0.1 |
| ABU-391 | <1 |
| ABU-392 | <0.1 |
| ABU-395 | <0.1 |

[0208] FIGS. 3A-3C further exemplarily show the neutralizing activity of ABU-174, ABU-175 and ABU190 against the SARS-CoV-2 pseudovirus. It can be seen from FIGS. 3A-3C that ABU-174, ABU-175 and ABU190 all have a good neutralizing activity, and the IC₅₀ thereof are 0.026 μg/ml (ABU-174), 0.0086 μg/ml (ABU-175), and 0.039 μg/ml (ABU190), respectively.

### Example 6: Evaluation of Ability of Antigen-Binding Unit of the Present Invention to Neutralize SARS-CoV-2 Euvirus

[0209] In this example, neutralizing activities of the antibodies to be detected were evaluated by cytopathic effect (CPE) assay and Plaque Reduction Neutralization Test (PRNT), respectively. The SARS-CoV-2 virus used was provided by Academy of Military Medical Sciences, the titer thereof (TCID50) was 10⁵/ml, and all experimental operations were completed in a BSL-3 laboratory.

### 6.1 Cytopathic Effect (CPE) Assay

[0210] (1) 100 μl of Vero E6 cells were added to each well of a 96-well culture plate at a concentration of 5×10⁴/ml, and cultured at 37° C., 5% CO₂ for 24 hours.

[0211] (2) The antibody to be detected was diluted to 10 concentrations: 1/10 μg/μl, 1/30 μg/μl, 1/90 μg/μl, 1/270 μg/μl, 1/810 μg/μl, 1/2430 μg/μl, 1/7290 μg/μl, 1/21870 μg/μl 1/65610 μg/μl, and 1/196830 μg/μl. 100 μl of the antibody to be detected at a specified concentration was taken out; an equal volume of SARS-CoV-2 euvirus (100 TCID50) was added; and the mixture was incubated at 37° C., 5% CO₂ for 1 h.

[0212] (3) After cultivation in step (1), the cell culture solution in the 96-well culture plate was discarded, and the mixture solution (200 μl) containing the antibody to be detected and the euvirus prepared in step (2) was added as an experimental group. After the mixture was incubated for 1 h, the supernatant was aspirated from the wells, and 200 μl of DMEM mediums (containing 2% antibiotic and 16 μg/ml of trypsin) were added to each well.

[0213] During the experiment, the cell control group and the virus control group were set in parallel. In the cell control group (4 replicate wells), after the cell culture solution in the wells was discarded; 200 μl of DMEM mediums (containing 2% antibiotic and 16 μg/ml of trypsin) were added to each well. In the virus control group (3 replicate wells), after the cell culture solution in the wells was discarded; 100 TCID50 of euvirus (100 μl) was added to each well, and the mixture was incubated at 37° C. for 1 h; after the incubation, the supernatant was aspirated from the wells, and 200 μl of DMEM mediums (containing 2% antibiotic and 16 μg/ml of trypsin) were added to each well.

[0214] (4) The cells were cultured for 4-5 days at 37° C., 5% CO₂.

[0215] (5) The cytopathic effect (CPE) was observed under the optical microscope, and the inhibitory activities of different concentrations of a monoclonal antibody against CPE were evaluated according to conditions of the cytopathic effect.

[0216] The detection results of the antigen-binding unit ABU-174 are shown in Table 6 below. The results show that the antigen-binding unit ABU-174 has an inhibitory effect on the virus at a cellular level, and the neutralizing antibody titer is 1.6 ng/μl.

TABLE 6
Neutralizing activity effect of antigen-
binding unit ABU-174 on SARS-CoV-2

| Antibody to be | | | | |
|---|---|---|---|---|
| detected | Dilution | Results (3 replicate wells) | | |
| Antigen-binding | 1:10 | − | − | − |
| unit ABU-174 | 1:30 | − | − | − |
| | 1:90 | − | − | − |
| | 1:270 | − | − | − |
| | 1:810 | − | + | + |
| | 1:2430 | + | + | + |
| | 1:7290 | + | + | + |
| | 1:21870 | + | + | + |
| | 1:65610 | + | + | + |
| | 1:196830 | + | + | + |
| Cell control | 200 μl DMEM | − | − | − |
| Negative control | 100TCID50 | + | + | + |

“+” means that the cell has CPE change, and means “−” that the cell does not have CPE change or has a normal cell morphology

[0217] The detection results of the antigen-binding unit ABU-175 are shown in Table 7 and FIG. 4 below. The results show that the antigen-binding unit ABU-175 has an inhibitory effect on the virus at a cellular level, and the neutralizing antibody titer is 0.7 ng/μl.

TABLE 7
Neutralizing activity effect of antigen-
binding unit ABU-175 on SARS-CoV-2

| Antibody to be | | | | |
|---|---|---|---|---|
| detected | Dilution | Results (3 replicate wells) | | |
| Antigen-binding | 1:10 | − | − | − |
| unit ABU-175 | 1:30 | − | − | − |
| | 1:90 | − | − | − |
| | 1:270 | − | − | − |
| | 1:810 | − | − | − |
| | 1:2430 | + | + | + |
| | 1:7290 | + | + | + |
| | 1:21870 | + | + | + |
| | 1:65610 | + | + | + |
| | 1:196830 | + | + | + |
| Cell control | 200 μl DMEM | − | − | − |
| Negative control | 100TCID50 | + | + | + |

“+” means that the cell has CPE change, and “−” means that the cell does not have CPE change or has a normal cell morphology

### 6.2 Plaque Reduction Neutralization Test (PRNT):

[0218] (1) 100 μl of Vero E6 cells were added to each well of a 96-well culture plate at a concentration of 5×10⁴/ml, and cultured at 37° C., 5% CO₂ for 24 hours.

[0219] (2) The antibody to be detected was diluted to 5 concentrations: 50 μg/ml, 10 μg/ml, 2 μg/ml, 0.4 μg/ml, and 0.08 μg/ml.

[0220] (3) After cultivation in step (1), the cell culture solution in the 96-well culture plate was discarded, and the mixture solution (200 μl) containing the antibody to be detected and the euvirus prepared in step (2) was added as an experimental group. After the mixture was incubated for 1 h, the supernatant was aspirated from the wells, and 200 μl of DMEM mediums (containing 2% antibiotic and 16 μg/ml of trypsin) were added to each well.

[0221] During the experiment, the cell control group and the virus control group were set in parallel. In the cell control group, after the cell culture solution in the wells was discarded; 200 μl of DMEM mediums (containing 2% antibiotic and 16 μg/ml of trypsin) were added to each well. In the virus control group (4 replicate wells), after the cell culture solution in the wells was discarded; 100 TCID50 of euvirus (100 μl) was added to each well, and the mixture was incubated at 37° C. for 1 h; after the incubation, the supernatant was aspirated from the wells, and 200 μl of DMEM mediums (containing 2% antibiotic and 16 μg/ml of trypsin) were added to each well.

[0222] (4) The cells were cultured for 4 days at 37° C., 5% CO₂.

[0223] (5) After fixed with formaldehyde, the cells were labeled with rabbit anti-SARS-COV serum (Sino Biological) and peroxidase-labeled goat anti-rabbit IgG (Dako). The plaques were observed after the cells were developed with TMB (True Blue, KPL), the inhibition rate was calculated and the dose-response curve was drawn.

[0224] FIG. 5 shows dose-response curves for the exemplary antigen-binding units ABU-174, ABU-175 and ABU190 of the present invention. It can be seen from FIG. 5 that the antigen-binding units ABU-174, ABU-175 and ABU190 all have good neutralizing activities against SARS-CoV-2 euvirus, and can effectively inhibit virus infection and cell invasion, and the IC50 are 0.5 μg/ml (ABU-174), 0.3 μg/ml (ABU-175) and 0.8 μg/ml (ABU-190), respectively.

### Example 7. In Vivo Potency of the Antigen-Binding Unit of the Present Invention

[0225] SARS-CoV-2 infects a cell by interaction with the hACE2 receptor. The neutralizing potency of the antigen-binding unit of the present invention against SARS-CoV-2 in vivo was evaluated in two different animal models.

7.1 Potency of the Antigen-Binding Unit in hACE2 Transgenic Mice

[0226] In the first model, hACE2 transgenic mice were used as a animal model and treated with 2 different modes, i.e., pre-exposure prophylaxis and post-exposure prophylaxis. Specifically, hACE2 transgenic mice were intranasally infected with SARS-CoV-2 viruses (2019-nCoV Beta CoV/Wuhan/AMMS01/2020) at a dose of 105 TCID50.

[0227] In the pre-exposure prophylaxis treatment mode, the antigen-binding unit of the present invention was injected intraperitoneally at a dose of 20 mg/kg into hACE2 transgenic mice 24 hours prior to viral infection and the potency of the antigen-binding unit as a pre-exposure prophylactic intervention was detected.

[0228] In the post-exposure prophylaxis mode, 2 hours after viral infection, mice were injected with the antigen-binding unit at a dose of 20 mg/kg. HG1K (IgG1 antibody against H7N9 virus) was used as a negative control, and 2 hours after virus infection, same was injected at 20 mg/kg. Body weights that reflect the health condition of the infected mice were recorded daily for 5 consecutive days.

### 7.2 In Vivo Potency of Antigen-Binding Unit in Hamster

[0229] In the second model, hamsters (Mesocricetus auratus) were used as a animal model and treated with 2 different modes, i.e., pre-exposure prophylaxis and post-exposure prophylaxis. Specifically, hamsters were intranasally infected with SARS-CoV-2 proviruses (SARS-COV-2/WH-09/human/020/CHN) at a dose of 105 TCID50, which is similar to hACE2 transgenic mice.

[0230] In the pre-exposure prophylaxis treatment mode of hamsters, the antigen-binding units of the present invention were injected at a dose of 20 mg/kg into hamsters 1 day prior to viral infection. In the control group, 2 hours after infection, animals were injected with PBS.

[0231] In the post-exposure prophylaxis treatment mode of hamsters, 2 hours after infection, the antigen-binding units of the present invention were injected intraperitoneally into hamsters at different doses (including 20, 10, 5 and 2 mg/kg) according to body weights. In addition, the hamster injected with phosphate buffered saline (PBS) was used as a control. Body weights of the infected hamsters were recorded daily for 7 consecutive days. Hamsters were sacrificed 7 days after infection and lungs were collected for viral load analysis.

### Sequence Information

[0232] The information of partial sequences involved herein is as shown in Table 8 below.

TABLE 8
Sequence Listing

| SEQ ID | Sequence |
|---|---|
| 1 | ARDVTLVRGTASPRFDY |
| 2 | ARDVTLVRGTASPRFDY |
| 3 | ARSTRRWLQFVFPFDY |
| 4 | ARSTRRWLQFVFPFDY |
| 5 | ARSTRRWLQFVFPFDY |
| 6 | ARSTRRWLQFVFPFDY |
| 7 | ARSTRRWLQFVFPFDY |
| 8 | ARQAPGGGLLGYYHGLDV |
| 9 | ARQAPGGGLLGYYHGLDV |
| 10 | ARDRYCGGDCSGPHYYYYGMDV |
| 11 | ARWDCSGGSCNYYYYYNMDV |
| 12 | ARWDCSGGSCNYYYYYNMDV |
| 13 | AREDILLVPAASNFYYFGMDV |
| 14 | ARGDYYDPDDRYNAYYSLGA |
| 15 | TKGSMLLEVY |
| 16 | ARAPSDSSGINGAFDI |
| 17 | ARPKAPGYSYLSLDY |
| 18 | CGFGVVTTDAYGMDV |
| 19 | VKDKACTTTSCYEGTFFDY |
| 20 | VRGDDSILTPTFDH |
| 21 | ARAGKGFMVITHFDY |
| 22 | ARPHTNSWDQFDY |
| 23 | ARPQGGSSWYRDYYYGMDV |
| 24 | ATSTAVLRYFAPTGGWFDP |
| 25 | AKDNGHSYGYSWFDP |
| 26 | ATDGATIPINYYGMDV |
| 27 | ARSPITMIVVVNAFDI |
| 28 | ARARITMIVVVNHFDY |
| 29 | ARVQSTGYKYWYFDI |
| 30 | ARGFDY |
| 31 | ARARDYGSGSPMDV |
| 32 | ARDGVYYGSVIYHHYDLHV |
| 33 | ARGGGELLRYPFDY |
| 34 | AKAGLGLETSGGNYFES |
| 35 | AKDRVTMNYFDY |
| 36 | ARVREGYTSGWYADY |
| 37 | ARDRSYYHSSGYHYYFDY |
| 38 | VRDRIVGGYSYGGDY |
| 39 | AKGRLSPRL |
| 40 | ARVKVDNVVFDL |
| 41 | ARDRGLAARPAGWVDL |
| 42 | ARENFHFSGTPPLY |
| 43 | ARKYTYDTSGFFLSSSRNAFDV |
| 44 | ARLGSNGYGL |
| 45 | ARTYSYDSSGFFLTSSREAFDI |
| 46 | VRKYSFDVSGFFLSSSRHAFDV |
| 47 | ARKYSYDTSGFFLTSSRDAFDV |
| 48 | VRKFSYDISGFFLTSSRDAFDV |
| 49 | ATEGV |
| 50 | LLIEGMGATSGD |
| 51 | ATTNDGYYYGMDV |
| 52 | ATNPHNTAMVLDYYGMDV |
| 53 | AGAYIAAAGWGWELFQYYFDY |
| 54 | AHQAPFEWFGVDY |
| 55 | TTDGLYCSGGSCYYHSYYYYYGMDV |
| 56 | ARDGLGNYDILTGYTERAFDI |
| 57 | ARVKPILRVVVVAATPCDY |
| 58 | ARHARGYQLLSPRLGELSLYRSFDY |
| 59 | ARATTTKMIVVVINAFDI |
| 60 | ARHWITMIVVVIKGGWFDP |
| 61 | ARIRGQWLVGKYYYGMDV |
| 62 | AHRGWGFSSSFFDY |
| 63 | ARMSSSLQHYYGMDV |
| 64 | ARMSSSLQHYYGMDV |
| 65 | ARDVTLVRGTASPRFDY |
| 66 | ARDVTLVRGTASPRFDY |
| 67 | AQEGRNYDRNWFDP |
| 68 | ARLIPIDGRDV |
| 69 | TTYWDQYTSTWT |
| 70 | ASIVKYDSSGYNFDY |
| 71 | TRDPWHESEHRFDP |
| 72 | AKDNKVSSWYSFDI |
| 73 | ARGLGYYVAL |
| 74 | VRGGQEVSLRRLDWFVGY |
| 75 | AKERGGSGKMYDY |
| 76 | ARRGAAVAGTTGGSAFDI |
| 77 | TKTSDLLYYGSGSYLPY |
| 78 | TRDGGAWD |
| 79 | ARGIPREYTTRWENAFDI |
| 80 | ARDRGADKDSNSGDVFDI |
| 81 | VGPQGAY |
| 82 | ARDPRGSSTSCSYDY |
| 83 | TGQERITIFGVVIISSDY |
| 84 | ARRLNDGANHS |
| 85 | SWDATVYYDMAV |
| 86 | ARPSSGSYADPFDI |
| 87 | VASRSSSLDY |
| 88 | ARSRGYGGLAGVDY |
| 89 | ARAYFDDSSGGFDY |
| 90 | AGSTYGDYVPHFYF |
| 91 | ARGLSSFTTIVVVFVGASFYFDS |
| 92 | ARGTTSTTMIVIVITAVSTWFDP |
| 93 | ARHPLKVDTIFGVVIIDPAPFDY |
| 94 | ARIASYYYDSSGYYQTRPIGHAFDI |
| 95 | AKDRAQLLWFGQSRGMDV |
| 96 | TSTSDW |
| 97 | TRLRSGLVGFDWLPLYGMDV |
| 98 | ARRGVGILKDLPVYAMDV |
| 99 | AREARQIFITMMTTKTSWFDP |
| 100 | ARVSSTAVVTGLDYYYGMDV |
| 101 | TTISVGLLWFGLAVRDHYYFDY |
| 102 | ARSYYDSSTGYYPDALDL |
| 103 | AKSGSVWGSYHKTYYFDY |
| 104 | AKEILKGYSSGWKYYYYGMDV |
| 105 | ARATTTMVRGVIYHYYYYGMDV |
| 106 | ARERLGRMVRGVNWFDP |
| 107 | ASWTMVRGVIRWFDP |
| 108 | ARQFHYVGIVVVVAPHYYYGMDV |
| 109 | ASPRGYSYGPFDY |
| 110 | ARVLYYDILTGYWWYYYGMDV |
| 11 | ARGAPITIFGVVISTWFDP |
| 112 | ARAHTDSLELGI |
| 113 | VRKYTYDTSGFFLTSTRSAFDV |
| 114 | ARKHVYDTSGFFLSSSRNAFDV |
| 115 | ARKYSFDISGFFLSSSRYALDV |
| 116 | ARDEGVTFHDHWANEIRYGMDV |
| 117 | ARARTTMIVVVSQFDY |
| 118 | ARDRGGWLLGSYYYYGMDV |
| 119 | ARGQISHYGFGESH |
| 120 | AHSGIAVVGNQLFHYYAMDV |
| 121 | AKERSSGSQWGWTYYYYGMDV |
| 122 | ARDPYGGNRRFHGWVYYYYGMDV |
| 123 | ARESTPDVRGVMNY |
| 124 | AKDAVASAGSPDY |
| 125 | ARDKLLWFGEPVVGYYYYYYMDV |
| 126 | ARDGGGDYAQIYFDY |
| 127 | ARDRLMTTYNYYSSMDV |
| 128 | AREPGDCSGGSCYYYGMDV |
| 129 | ARATRGYSYDDAFDI |
| 130 | ASPSYTDLLTGYYVPVDY |
| 131 | AKDPRVNELLWFGSLTQFYFDD |
| 132 | AKSGGPFHLSLYYYMDV |
| 133 | ARAFYGHAFDF |
| 134 | AKGLTIPFDK |
| 135 | AKGLTIPFDK |
| 136 | ARRGKYCSGGRCYSWWFDP |
| 137 | ARVASLIGDDY |
| 138 | ARVASLIGDDY |
| 139 | AHKPSGWSLRFDS |
| 140 | ARESLFNWFDS |
| 141 | AKGLTIPFDN |
| 142 | ARVDYDSSRNY |
| 143 | ARVERWLVLGYYYYGMDV |
| 144 | GSIDY |
| 145 | AKMYSDYDDNYYGLDV |
| 146 | ARDRYCSSTSCGGYYYYMDV |
| 147 | ARAPNDFWSGYPYYFDY |
| 148 | TRDGSTAAIFGNIDY |
| 149 | ARGVVRNDYGDPGFDY |
| 150 | ATAPAYCSGGSCPENNWFDP |
| 151 | AILWFGEFYFYDLFYNAVDV |
| 152 | AILWFGEFYFYDLFYNAVDV |
| 153 | ASRREQWLGDLGYYYYGMDV |
| 154 | ARGGAHSEDY |
| 155 | ARHQDPLDIVATVDWGGLDY |
| 156 | ARVASLIGDDY |
| 157 | ATTGTDNYYYYMDV |
| 158 | ARKNCSGGICYFHDY |
| 159 | AHKPSGWSLRFDS |
| 160 | AKGQTIQLWLFGAL |
| 161 | ALTVSSWYPGIFEN |
| 162 | AKAFSGSYWDAFDI |
| 163 | AKAASGARGYYGMDV |
| 164 | ARSSSGHYVSDLGY |
| 165 | ARALNGYRYNDY |
| 166 | AREEGGGSSTHFDC |
| 167 | ARTREGSYYYGMDV |
| 168 | VRGGLQFVVAVGPYGVDV |
| 169 | VRGGLQFVVAVGPYGVDV |
| 170 | ARDIGGGAPDY |
| 171 | AIKPSIPGYFDP |
| 172 | ARVGGWQRSPRPN |
| 173 | ARVGGWQRSPRPN |
| 174 | ARGQGYGRVLLWFGE |
| 175 | ARGQGYGRVLLWFGE |
| 176 | ARPSSGSRFDY |
| 177 | ARGFDY |
| 178 | AKARGVVLFDY |
| 179 | ARHSYGSGTYLDPFDY |
| 180 | ARQPHLAYYYDSSGYNDAFDI |
| 181 | ARGAVVTPFGLDS |
| 182 | ASEDYYDSSGYYWY |
| 183 | ARLSAIAVVGYYYYAMDV |
| 184 | ARDFIAASPFYYYYYMDV |
| 185 | ATSPGGYGVRRTVLEDFRH |
| 186 | WTMEYDDYSFVYDY |
| 187 | ARGGKQQLVRNYYLDS |
| 188 | ATGFGGVIVRGFDY |
| 189 | ARVYGDYSYYMDV |
| 190 | ARDLGEAGGMDV |
| 191 | VREIESGVDFWSGHYY |
| 192 | ARDSAYYDTIGYYSGDY |
| 193 | GRSFRGSCFDYL |
| 194 | ALGTGSYYGVNY |
| 195 | AKDMGGRYSSGLYYYYYGMDV |
| 196 | ARELRGYFDY |
| 197 | ARDPNDFWSGFPRGAFDI |
| 198 | ASHARYEEETFDY |
| 199 | VRDSYTSAWTPAGYFDL |
| 200 | AKDHYGSIDY |
| 201 | ARPYTSRWFWSN |
| 202 | ALLPPNAYDYGDGLLDH |
| 203 | ARHRAAGGNYYYGMDV |
| 204 | ARERVGPAAGYMDV |
| 205 | ARAAYYYDSSGYGWFDP |
| 206 | ARGDYTEYSYYYMDV |
| 207 | ALPTGASSSYSGPNY |
| 208 | ARDEVIAVATGEGMDV |
| 209 | AKDMGYDILTGSGLGDY |
| 210 | AKEPLFGETYGMDV |
| 211 | ARDKGSGSYYSGAYYYYMDV |
| 212 | ATFNSGNDNAYEY |
| 213 | AREYPDFWSGHYYYYMDV |
| 214 | ARLPYGMDV |
| 215 | ARGLYDKSGYRSDGFDS |
| 216 | ARGFEGYCSGGRCYSYFDY |
| 217 | ARVKNWDYGLY |
| 218 | ARDGQSDWHFDL |
| 219 | ARVYGDYLDH |
| 220 | AHRSFLYNIFNGYSYAPFDY |
| 221 | AKDLFSGDRDF |
| 222 | AKDSGAVLLWFGADF |
| 223 | AREGAYDIWRGSYMRAYDH |
| 224 | ARYIEMFDP |
| 225 | ARQAYGDYGWDYYYGMDV |
| 226 | LKDWDWEYEDSRPTLRGSVY |
| 227 | ARGSVFWFGEGKNWFDP |
| 228 | ARGSVFWFGEGKNWFDP |
| 229 | AREDSSGWSRGDY |
| 230 | ARRFVVREVEYNWFDP |
| 231 | ARDGYCNSMRCYRYYHGMDV |
| 232 | ATGPTAKPNKQWGYWFDP |
| 233 | ASPVSVEQDFDI |
| 234 | TTPVGDF |
| 235 | STSHPPFFDY |
| 236 | ARGLWQLVSPVFDY |
| 237 | AKVTNRGVRGLYFDY |
| 238 | ASPVSVEQDFDI |
| 239 | AINTLLVTA |
| 240 | VHRSFLYDIFSGYSYAPFDY |
| 241 | AHRSFLYNIFDGYSYAPFDY |
| 242 | AGGADCRRTSCHYLVSNREEYMGV |
| 243 | ARGLVLSGTRYSYFYGMDV |
| 244 | VKDWDWEYEDNRPTLRGSVY |
| 245 | VKDWDWEYEESRPTLRGSVY |
| 246 | AKGGPIFWLGEGKNWFDA |
| 247 | ARDKGGILMLRGADF |
| 248 | ARTLIAAAGSAFDI |
| 249 | ARGPTSITMIVVVDDAFDI |
| 250 | ARVMNSSWYTRYYYNYMDV |
| 251 | ARRGGGCSEGVCYNFDR |
| 252 | ARGDPRDY |
| 253 | ARGSYYYDSSGYYLDY |
| 254 | ARAAYYYDSSGYGWFDP |
| 255 | TTDLGATGIYYYYYMDV |
| 256 | ARFPRDYYDSSGYLIQEGNFDY |
| 257 | ARVTRAGAAGDGGAFDI |
| 258 | ARSVVPVAGTDY |
| 259 | ARDQHPGYPALVYYYYYMDV |
| 260 | ARDNIQTFDY |
| 261 | ATSSPVAGYNSWFDP |
| 262 | ATGPAVIPLRWFDP |
| 263 | ATAPAAAGPTDWFDP |
| 264 | AISPSVHSLWWFDP |
| 265 | ARDEIHYDILTGYYNRFWFHP |
| 266 | ARDAETGYYDSSGYPINWFDP |
| 267 | ARHYYDTGAYYVPFDH |
| 268 | AHFQGFGESEYFQH |
| 269 | AHRHPLTGFDS |
| 270 | ATPRGYSYGPLDY |
| 271 | ASPRGYSYGPFDY |
| 272 | ARDRVDKGYDFWSSWYFDL |
| 273 | ASGGGSYFDAFDI |
| 274 | ARDRSGSYYGGFDY |
| 275 | AKAVYGGNSVYFDY |
| 276 | ARIYGGNYENYFDY |
| 277 | ARESEAGTTPSFDY |
| 278 | ARSLVRGVITYFDY |
| 279 | ARGLSMEV |
| 280 | ARGGYSSSWYGTKYYFDY |
| 281 | ARGPTVTTFFRRNAWFDP |
| 282 | ARGRYSSGWYGSRNWFDP |
| 283 | ARLSMGAARQSGFDP |
| 284 | ARDGGRDGYNELGARVYYYYGMDV |
| 285 | ARIGSYGI |
| 286 | AKLGCSGGSCYYYYGMDV |
| 287 | ARGDHYYDRSGPHKFDY |
| 288 | ARDSPLKFDSFGYPLYGMDV |
| 289 | ARGIVGATPGYFDY |
| 290 | AKAVSGWPIYFDA |
| 291 | AKAVSGWPIYFDA |
| 292 | AHTIHSGYDRTFDS |
| 293 | AREESYSSSSPLDY |
| 294 | AAGSDFWSGYYVNYYMDV |
| 295 | ARLTAAGVYFDY |
| 296 | AKTRGRGLYDYVWGSKDY |
| 297 | AKTRGRGLYDYVWGSKDY |
| 298 | ARDESGSYYGDQAFDI |
| 299 | ARDRRARAYEIPFGSDHYYFGMDV |
| 300 | ARDYYGSGSYPIGYMDV |
| 301 | TTSYCSTKVCFDYWFDP |
| 302 | ASNLYATSPYGGVKN |
| 303 | AKDIGSGSPDAFDI |
| 304 | VKDLEFRGGTGGFDL |
| 305 | ARDGHSAWGAFDI |
| 306 | ARDHPTLRRAFDY |
| 307 | ARDRGSSSWWGWLDP |
| 308 | ATRRGYSGYGAAYYFDY |
| 309 | AREVYVGGEDDYSYYYGLDV |
| 310 | TTDLGEAGPTEWLRSSLFDY |
| 311 | TTSYCNPKVCFDYWFDP |
| 312 | AKEYYYDSSGYYYREDAFDI |
| 313 | AKDGGLTAYLEY |
| 314 | ATEKWEVVDVCFDY |
| 315 | AKDIGWDVVVVAATHGVFDY |
| 316 | AKDPYYYGSGSSNFFDY |
| 317 | ARGPDYYDTGGYFDL |
| 318 | ARDGYKQIYWYLDL |
| 319 | AKGEGVYGSGSRYFLDY |
| 320 | AREWSRGAVAGTGYFDY |
| 321 | AKVAKLPGDYYGMDV |
| 322 | ARELRGAFDI |
| 323 | ARDWGEYYFDY |
| 324 | ARDYGDLYFDY |
| 325 | ARDRRVGSPYYYYYMDV |
| 326 | ARDLGDNAFDI |
| 327 | ARDRYSGYDF |
| 328 | ARLSGTGYGGDGGWFDP |
| 329 | AGKKIYYGSSFDP |
| 330 | ARGGSGSGWYGGRFDY |
| 331 | ARVWRETYYYDSSGDSFDY |
| 332 | ARGRSITGIRDVDF |
| 333 | ARGRGNYMFRWFDP |
| 334 | ARGGLWYDSINYYGMDV |
| 335 | ARLILRWPTTWDYFDY |
| 336 | ARVDGPFDY |
| 337 | ARCPFWNYGHCYLDN |
| 338 | ARPSVRWYYHAMDV |
| 339 | AKERRPVLRYFDWLPIEAPDY |
| 340 | ARGQYDILTGYQYGAFDI |
| 341 | AAHYYSRTDAFHI |
| 342 | ARDSVSGSGSYYKGLWFDP |
| 343 | VVGIGYCSSPSCPPLRWFDY |
| 344 | ARERGYSGSGSLYYFDY |
| 345 | AHYSSSRPPLFDY |
| 346 | AKGHWST |
| 347 | ANGAYYYGSGSYYNGAAY |
| 348 | AKGGYYDILTGYFPFDY |
| 349 | ARDLVVYGMDV |
| 350 | ARDPIRNGMDV |
| 351 | ARDLVVYGMDV |
| 352 | ARDAMSYGMDV |
| 353 | ARDRVVYGMDV |
| 354 | ARDAAVYGIDV |
| 355 | ARDLISRGMDV |
| 356 | ARDRVVYGMDV |
| 357 | ARDLVSYGMDV |
| 358 | ARDLVVYGMDV |
| 359 | ARDAQNYGMDV |
| 360 | ARDRGLVSDY |
| 361 | QQTYIIPYS |
| 362 | QQYYSYPYT |
| 363 | SSYAGSNNLV |
| 364 | QRYDSYRT |
| 365 | QQSYSTPYT |
| 366 | QQYDNLPLT |
| 367 | QQYATSPWT |
| 368 | AAWDDSLSSWG |
| 369 | QTWGTGTVV |
| 370 | QSADSSGTWV |
| 371 | QQRSDWTPT |
| 372 | QQFNSYPRT |
| 373 | CSYAGNTTF |
| 374 | STWDASLKEVL |
| 375 | MQGTHWPLT |
| 376 | QQYDSYPWT |
| 377 | QQLTTYPRT |
| 378 | QSADSSGTWV |
| 379 | QQFYSTPVT |
| 380 | QSYDGSNVV |
| 381 | QQYYSTPLT |
| 382 | QQYYDTPMYT |
| 383 | QQYNSYPYT |
| 384 | SSYTSSSTFV |
| 385 | QSADSSGTYSNWV |
| 386 | SSYTSSSTW |
| 387 | QQYGSSPLT |
| 388 | QQYGSSPLT |
| 389 | QQYGA |
| 390 | QQYGSSPWT |
| 391 | AVWDDSLNGVV |
| 392 | SSFAGSNNPYV |
| 393 | QQYYSTPYT |
| 394 | HQYDSWPPT |
| 395 | QNRDDWPPLFT |
| 396 | QQYYSTPRT |
| 397 | QQAHSFLSLT |
| 398 | QSADTSGTYLWV |
| 399 | QQYDSLPIT |
| 400 | QQYYGIPT |
| 401 | QKCDNFPWT |
| 402 | AAWDDSLSVVV |
| 403 | QQSYSSPPT |
| 404 | QSYDDTLTI |
| 405 | QQSYGAPPT |
| 406 | QQSYSTPPT |
| 407 | QQSFSTPPT |
| 408 | QQSYSSPPT |
| 409 | YSTDSSGNHWV |
| 410 | LLSYSGVRI |
| 411 | QSYDSSLSKV |
| 412 | QAWDSSTFYV |
| 413 | GTWDSSLSAVV |
| 414 | QQYNNWPWT |
| 415 | LLSYSGARPV |
| 416 | QQSYSTPPYT |
| 417 | SSYTSSSTRVV |
| 418 | QQYYSTPIT |
| 419 | QQYGSSPLT |
| 420 | GTWDSSLSVVV |
| 421 | SSYTSSSTFAV |
| 422 | MQALQTPLT |
| 423 | MQALQTVFT |
| 424 | MQALQTVFT |
| 425 | QQTYIIPYS |
| 426 | QQYYSYPYT |
| 427 | QVWDSSSDHVV |
| 428 | QAWDSSTSYW |
| 429 | GTWDSSLSVGV |
| 430 | NSYTSNSTAV |
| 431 | QQSYNWPRT |
| 432 | LQHNSYPYT |
| 433 | QQYNGYPHT |
| 434 | QQYSYYSA |
| 435 | QQYGT |
| 436 | SAWDSSLSAWV |
| 437 | QQYYSTPIT |
| 438 | QSFDDNDQV |
| 439 | LLYVGGGIWV |
| 440 | QQYNIWLT |
| 441 | MQGTLLLT |
| 442 | ETWDSSLDAVI |
| 443 | AAWDDSLSGRV |
| 444 | MQGTHWPHPT |
| 445 | MQGTPWPT |
| 446 | QQSGSSYT |
| 447 | MQSLPSGFT |
| 448 | MQSLDLPPT |
| 449 | QQGSSFPLT |
| 450 | QQYDSSPIT |
| 451 | NSRDSSGQLHVVV |
| 452 | NSRDNNDDLPL |
| 453 | SSYAGSNNLGV |
| 454 | QSYDSSLSGVV |
| 455 | QQYYSTPFT |
| 456 | MQGTHWPIT |
| 457 | SSYTSSSTLVV |
| 458 | QQSYSTPYT |
| 459 | CSYAGSYVV |
| 460 | QQSYSTLHT |
| 461 | NSRDSSGNHLV |
| 462 | QAWDTITHEEV |
| 463 | QQYNYYPVA |
| 464 | TQATQFPLT |
| 465 | QQSYSTPPYT |
| 466 | QSYDSSLSSPVV |
| 467 | AAWDDSLSGPV |
| 468 | NSRDSSGNHLV |
| 469 | QQYDNLPYT |
| 470 | GTWDSSLSAGV |
| 471 | QQYNNWPPWT |
| 472 | QAWDSSTYW |
| 473 | QQSYSSPPT |
| 474 | QQSYSSPPT |
| 475 | QQSYSSPPT |
| 476 | HHYGTSPPFT |
| 477 | QQYGSSPLT |
| 478 | QSADSSGTYYV |
| 479 | QQSYSTPRT |
| 480 | QAWDSSTVV |
| 481 | MQSIQLPLT |
| 482 | MQSIQLPFT |
| 483 | MQALQTYT |
| 484 | YSTDSSGNHRRV |
| 485 | SSYTSSSTLV |
| 486 | YSTDSSGNHRGV |
| 487 | QQYNSFPYT |
| 488 | QQRSNWPVT |
| 489 | LQHNSYPLT |
| 490 | LQHNSYPFT |
| 491 | QQYGTSAGT |
| 492 | QQYGNLPPFT |
| 493 | QQYYSTPLT |
| 494 | MQNRHLYT |
| 495 | MQNRHLYT |
| 496 | MQTLQTSIT |
| 497 | QQYGSSQYS |
| 498 | QQYGSSQYT |
| 499 | QHYDTLLT |
| 500 | QQYFDTPWT |
| 501 | MQNRQLYT |
| 502 | QQFDNLPPFT |
| 503 | QQSYSARMST |
| 504 | MQGTQWPWT |
| 505 | QQFDNSPPWT |
| 506 | QSADSSGTYVV |
| 507 | CSYAGSYTLV |
| 508 | QQSYSTPFT |
| 509 | MQGTHSYT |
| 510 | QAWDSSTASYV |
| 511 | SSYTSASTW |
| 512 | SSYTSASTW |
| 513 | MQGTHSPWT |
| 514 | GTWDSSLSAWV |
| 515 | QSADGRGDWV |
| 516 | QQYGSSQYS |
| 517 | QQYDSYSGT |
| 518 | ETWDSPYW |
| 519 | QHYDSLLT |
| 520 | SSYTSSSTW |
| 521 | MQALQTLT |
| 522 | QQYNSYPLFT |
| 523 | MQGTHWPMT |
| 524 | QQYGSSPMYT |
| 525 | QQANSFPA |
| 526 | QAWDSHTVV |
| 527 | QQYNSYSWT |
| 528 | QQYTSWPLT |
| 529 | QQYTSWPLT |
| 530 | YSPKV |
| 531 | QQYNILPHT |
| 532 | QQYYNAPLS |
| 533 | QQYYNAPLS |
| 534 | QQRSNWIT |
| 535 | QQRSNWIT |
| 536 | AAWDDSLNGPV |
| 537 | QQYGSSPQT |
| 538 | QQYNNWPPLT |
| 539 | QQYYSYSLT |
| 540 | CSYAGSSTFYV |
| 541 | QSADSSGTWV |
| 542 | QQYGSSPEMYT |
| 543 | HQYGSGLGT |
| 544 | MQSIQLRT |
| 545 | QQCSSWPLSLT |
| 546 | QQYNNWPPIT |
| 547 | QQSNSFPPT |
| 548 | QSYDISLSAYV |
| 549 | QQYNTYSLT |
| 550 | QQLNSYPPA |
| 551 | QQYYRTPLT |
| 552 | LQHHTYPLT |
| 553 | MQSIQLWS |
| 554 | LLSYSGPWV |
| 555 | SSYAGSNNYV |
| 556 | QQYDNLPSFT |
| 557 | CSYAGSYTLV |
| 558 | CSYAGSSTVV |
| 559 | QQSYNVPPWT |
| 560 | MQGTHWPWT |
| 561 | QSYDINLSAV |
| 562 | HQYHNSPWT |
| 563 | MQALQTPYT |
| 564 | QVWDSSSDHYV |
| 565 | QQYGSSPRT |
| 566 | QQYDNWLPYT |
| 567 | LLSYSGAYVL |
| 568 | QQYSNWPLYT |
| 569 | AAWDDSLNGPYV |
| 570 | SSYTSISTVL |
| 571 | QVWDGGSDDRGYV |
| 572 | SSFTSNGAWV |
| 573 | QQNYIRPYT |
| 574 | QQYDNLPIT |
| 575 | ATWDDSLNGV |
| 576 | QQYNNWPYT |
| 577 | GADHGSGSNFVYV |
| 578 | CSYAGSSTLV |
| 579 | QQHDSAPYT |
| 580 | QQYNSYVT |
| 581 | MQGKHLRWT |
| 582 | YSTDYSGNHGV |
| 583 | QQCSNWPNT |
| 584 | QSADSNDSWV |
| 585 | GTWDSSLSAGV |
| 586 | QQGHNFPWT |
| 587 | QQYGSLPLT |
| 588 | QQYGSLPLT |
| 589 | QSYDSSLSGWV |
| 590 | QQRRNWPLT |
| 591 | QHRSNWPYT |
| 592 | AAWDDSLNGW |
| 593 | MQTTQFPRT |
| 594 | QSQDSSATYVV |
| 595 | QAWDSSIEV |
| 596 | QQYGSSPPWT |
| 597 | QSGDSSGTYVV |
| 598 | MQTTQFPRT |
| 599 | LQYNTYSYS |
| 600 | QQYNSYIT |
| 601 | QQYNSYVT |
| 602 | YSTDSSDNQRV |
| 603 | QHLKSYPLT |
| 604 | QQGHNFPWT |
| 605 | QQGHNFPWT |
| 606 | QQYHNFP |
| 607 | QSYDSSLSVV |
| 608 | QAWDSNTGV |
| 609 | QSYDSSLSGSV |
| 610 | QSVDNTGASPHVV |
| 611 | QQYHTYWT |
| 612 | QAWDSGT |
| 613 | QQYGSSPRT |
| 614 | QQYGSSPRT |
| 615 | QHYGTSPYT |
| 616 | QQYGSSTLVT |
| 617 | CSYAGSSLWV |
| 618 | QSYDSSFWV |
| 619 | GTWDSSLSAVV |
| 620 | YSTDRSGNHRGV |
| 621 | NSRDSSGNHLYWV |
| 622 | QSYDSSLSGHVV |
| 623 | GTWDSSLSAGGV |
| 624 | CSYAGSSTFVV |
| 625 | GTWDSSLSAVV |
| 626 | QQLNSYPPT |
| 627 | QQSYSTLWT |
| 628 | QQYGDSPET |
| 629 | QAWDSSTVV |
| 630 | QQYDNLPYT |
| 631 | QQYDNLPYT |
| 632 | QQRSNWPSIT |
| 633 | QQANSFPLA |
| 634 | QQSYSTPFG |
| 635 | LSYDSSLSGSV |
| 636 | QQFNNYPLT |
| 637 | QQYDNLPFT |
| 638 | SSYTSSSAYV |
| 639 | NSRDSSGNHW |
| 640 | CSYAGSYPVV |
| 641 | SSYAGSNKV |
| 642 | QQYGSSGGYT |
| 643 | QQSYSTPYT |
| 644 | QQYGSSSWT |
| 645 | QQSYSTPYT |
| 646 | QAWDSSTANWV |
| 647 | SSFTDSSTLVV |
| 648 | QQSYSVPHT |
| 649 | QQYNNWLT |
| 650 | QQYNNWPPIT |
| 651 | QQYNNWPPIT |
| 652 | SSYAGTNKIL |
| 653 | QQSYSTPLT |
| 654 | SSYTSSSTWV |
| 655 | QQSYSTPYT |
| 656 | MQALQTPGT |
| 657 | MQALQTPGT |
| 658 | QQYNSYSA |
| 659 | QAWDRTTAT |
| 660 | QSYDSSLSGWV |
| 661 | SSYTSLNTLEVV |
| 662 | MQALQTPYS |
| 663 | QVWDSSSDRTVV |
| 664 | ASWDDKVRGWV |
| 665 | QQYGSSPWT |
| 666 | QQYNSYSRT |
| 667 | QQYNTSPLT |
| 668 | QSYDSSLSGSL |
| 669 | QSADSSGTYRV |
| 670 | QQYGRT |
| 671 | SSYTNIDTLEIV |
| 672 | LQHNSYPRT |
| 673 | QVWHSSFDPWV |
| 674 | QQSYSTPPTT |
| 675 | QQYNSYFPT |
| 676 | QVWDSSSDHYWV |
| 677 | GTWDSSLSAGV |
| 678 | QTWGTGPQVL |
| 679 | QQYDNLLT |
| 680 | QVWDSSGDHWV |
| 681 | QQRSNWLT |
| 682 | QQHDNLPSFT |
| 683 | QQYGSSPRT |
| 684 | QQYGSSPRT |
| 685 | LLYYGGAPV |
| 686 | QQLNSYPPA |
| 687 | QQYDNLPQT |
| 688 | CSYAGSSLWV |
| 689 | QSYDSSNQV |
| 690 | QQRSNWLFT |
| 691 | GTWDSSLSAGV |
| 692 | MQASQFPLT |
| 693 | CSFAGSNRE |
| 694 | QQYGSSPWT |
| 695 | GTWDSSLSAWV |
| 696 | QHYSSSAPIT |
| 697 | QQRNKWPGT |
| 698 | QQYGDSPYT |
| 699 | QQLNSYPLT |
| 700 | CTYAGSSTWV |
| 701 | QQSYSSPYT |
| 702 | QQANSFPRT |
| 703 | QQFNDYPLT |
| 704 | QSYDSSLSGSV |
| 705 | QQYSTYYT |
| 706 | MQGSHWPWT |
| 707 | AAWDDSLNGPWV |
| 708 | CSYAGSYTWV |
| 709 | QQLNSYPFT |
| 710 | QQYDNLPRT |
| 711 | QQLNSYPLT |
| 712 | QQSYSTPPDT |
| 713 | QQYDNLPPT |
| 714 | QQSYTTPLFT |
| 715 | QQLNGYPHSA |
| 716 | HQYDNLPPT |
| 717 | QQLNSYPLT |
| 718 | QQLNSNPPIT |
| 719 | QQSYSTPPYT |
| 720 | HQYDNLPRT |
| 721 | QVQLVESGGGVVQPGRSLRLSCAASGFTFSSYGMH |
| | WVRQAPGKGLEWVAVIWYDGSNKYYADSVKGRFTI |
| | SRDNSKNTLYLQMNSLRA |
| | EDTAVYYCAREGVDTAMVGFDYWGQGTLVTVSS |
| 722 | QVQLVESGGGVVQPGRSLRLSCAASGFTFSSYGMH |
| | WVRQAPGKGLEWVAVIWYDGSNKYYADSVKGRFTI |
| | SRDNSKNTLYLQMNSLRAEDTAVYYCAREGVDTAM |
| | VGFDYWGQGTLVTVSS |
| 723 | EVQLVQSGAEVKKPGESLRISCKGSGYSFTSYWIS |
| | WVRQMPGKGLEWMGRIDPSDSYTNYSPSFQGHVTI |
| | SADKSISTAYLQWSSLKASDTAMYYCARSTRRWLQ |
| | FVFPFDYWGQGTLVTVSS |
| 724 | EVQLVQSGAEVKKPGESLRISCKGSGYSFTSYWIS |
| | WVRQMPGKGLEWMGRIDPSDSYTNYSPSFQGHVTI |
| | SADKSISTAYLQWSSLKASDTAMYYCARSTRRWLQ |
| | FVFPFDYWGQGTLVTVSS |
| 725 | EVQLVQSGAEVKKPGESLRISCKGSGYSFTSYWIS |
| | WVRQMPGKGLEWMGRIDPSDSYTNYSPSFQGHVTI |
| | SADKSISTAYLQWSSLKASDTAMYYCARSTRRWLQ |
| | FVFPFDYWGQGTLVTVSS |
| 726 | EVQLVQSGAEVKKPGESLRISCKGSGYSFTSYWIS |
| | WVRQMPGKGLEWMGRIDPSDSYTNYSPSFQGHVTI |
| | SADKSISTAYLQWSSLKASDTAMYYCARSTRRWLQ |
| | FVFPFDYWGQGTLVTVSS |
| 727 | EVQLVQSGAEVKKPGESLRISCKGSGYSFTSYWIS |
| | WVRQMPGKGLEWMGRIDPSDSYTNYSPSFQGHVTI |
| | SADKSISTAYLQWSSLKASDTAMYYCARSTRRWLQ |
| | FVFPFDYWGQGTLVTVSS |
| 728 | QMQLQESGPGLVEPSETLALTCTVSGGSINRNHFW |
| | AWLRRPPGKGLEWIGSASYTGTTHDNPSLRSRLTI |
| | SVDTSKNQFSLKMTSVTVADTAVYFCARQAPGGGL |
| | LGYYHGLDVWGQGTTVTVSP |
| 729 | QMQLQESGPGLVEPSETLALTCTVSGGSINRNHFW |
| | AWLRRPPGKGLEWIGSASYTGTTHDNPSLRSRLTI |
| | SVDTSKNQFSLKMTSVTVADTAVYFCARQAPGGGL |
| | LGYYHGLDVWGQGTTVTVSP |
| 730 | QVQLVQSGAEVKKPGASVKVSCKASGYTFTSYGIS |
| | WVRQAPGQGLEWMGWISAYNGNTNYAQKLQGRVTM |
| | TTDTSTSTAYMELRSLRSDDTAVYYCARDRYCGGD |
| | CSGPHYYYYGMDVWGQGTTVTVSS |
| 731 | EVQLVESGGGLVQPGGSLRLSCAASGFTFSYFEMN |
| | WVRQAPGKGLEWISYISSSGTNIYYADSVKGRFTI |
| | SRDNAENSLYLQMNSLRVEDTAVYYCARWDCSGGS |
| | CNYYYYYNMDVWGQGTRVTVSS |
| 732 | EVQLVESGGGLVQPGGSLRLSCAASGFTFSYFEMN |
| | WVRQAPGKGLEWISYISSSGTNIYYADSVKGRFTI |
| | SRDNAENSLYLQMNSLRVEDTAVYYCARWDCSGGS |
| | CNYYYYYNMDVWGQGTRVTVSS |
| 733 | QVQLVQSGAEVKKPGASVKVSCKASGYKFSNYYIH |
| | WVRQAPGQGLEWMGWINPYSGETNYAQKFQGRVTM |
| | TRDTSTSTAYMELSRLRADDTAVFFCAREDILLVP |
| | AASNFYYFGMDVWGQGTTVAVSS |
| 734 | QVQLVQSGAEVRKPGASVKISCKSSGYIFTNFYVD |
| | WVRQAPGRGLEWMGRVNPNDGSSIYAQKFRDRFSL |
| | TSDTSTSTVFLNLRGLTSEDTALYFCARGDYYDPD |
| | DRYNAYYSLGAWGQGTTVIVSS |
| 735 | EVQLLESGGGLQQRGGSLRLSCAASGFNFSSYAMS |
| | WVRQAPGKGLEWVSSISATGGTTFYADSEKGRFTI |
| | SRDNSKNILYLQMNSLRAEDTAVYYCTKGSMLLEV |
| | YWGQGTLVTVSS |
| 736 | EVQLVESGGGLVQPGGSLRLSCGVSGIIVSRNEMS |
| | WVRQAPGKGLEWVSYISSSGTGVHYADSVKGRFTS |
| | SRDSAKNSVYLQMHSLRAEDTAVYYCARAPSDSSG |
| | INGAFDIWGQGTMVTVSS |
| 737 | QVQLVQSGAEVKKPGSSVKVSCKASGGTFSTYAIS |
| | WVRQAPGQGLEWMGGIIPIFGTPTYAQRFQGRVTI |
| | TADESTSTAYMELTSLRSDDTAVFYCARPKAPGYS |
| | YLSLDYWGQGTLVTVSS |
| 738 | QVQLVESGGGVVQPGRSLRLSCAASGFTFSSYGMH |
| | WVRQAPGKGLEWVAVISYDGSNKYYADSVKGRFTI |
| | SRDNSKNTLYLQMNSLRAEDTAVYYCCGFGVVTTD |
| | AYGMDVWGQGTTVTVSS |
| 739 | EVQLVESGGGLVQPGGSLRLSCSASGFTFNNYAMH |
| | WVRQAPGKGLEHVSVISSYGDNTFYADSVKGRFTI |
| | SRDNSKNTLYLQMSSLRAEDTAVYYCVKDKACTTT |
| | SCYEGTFFDYWGQGTLVTVSS |
| 740 | EVQLVESGGGLVQPGGSLRLSCAASGFVFSNYWMT |
| | WVRQAPGKGLEWVANIKQDESEEYYRDSLKGRFTI |
| | SRDNAKNSVFLQMDSLRVEDSAVYYCVRGDDSILT |
| | PTFDHWGQGTLVTVSS |
| 741 | QVQLQESGPGLVKPSQTLSLTCTVSGGSISSGGYY |
| | WSWIRQHPGKGLEWIGYIYYSGSTYYNPSLKSRVT |
| | ISVDTSKNQFSLKLSSVTAADTAVYYCARAGKGFM |
| | VITHFDYWGQGTLVTVSS |
| 742 | EVELVQSGAEMKEPGESLKISCKGFGYNFNNYWVA |
| | WVRQTPGKGLEWMGIIYGGDSDTRYNPSMQGQVTI |
| | SADKSINTIYLEWDVLRASDSGIYYCARPHTNSWD |
| | QFDYWGQGTLVTVSS |
| 743 | QVQLVQSGSELKKPGASVKVSCKASGYTFTSYAMN |
| | WVRQAPGQGLEWMGWINTNTGNPTYAQGFTGRFVF |
| | SLDTSVSTAYLQISSLKAEDTAVYYCARPQGGSSW |
| | YRDYYYGMDVWGQGTTVTVSS |
| 744 | QVQLVQSGAEVKKPGASVKVSCKVSGYTLTELSMH |
| | WVRQAPGKGLEWMGGFDPEDGETIYAQKFQGRVTM |
| | TEDTSTDTAYMELSSLRSEDTAVYYCATSTAVLRY |
| | FAPTGGWFDPWGQGTLVTVSS |
| 745 | QVQLVESGGGVVQPGRSLRLSCAASGFTFSSYGMH |
| | WVRQAPGKGLEWVAVISYDGSNKYYADSVKGRFTI |
| | SRDNSKNTLYLQMNSLRAEDTAVYYCAKDNGHSYG |
| | YSWFDPWGQGTLVTVSS |
| 746 | QVQLVESGGGVVQPGRSLRLSCAASGFTFSSYPMH |
| | WVRQAPGKGLEWVAVISYDGSNKYYADSVKGRFTI |
| | SRDNSKNTLYLQMNSLRAEDTAVYYCATDGATIPI |
| | NYYGMDVWGQGTTVTVSS |
| 747 | QVQLQESGPGLVKPSQTLSLTCTVSGGSISSGGYY |
| | WSWIRQHPGKGLEWIGYIYYSGSTYYNPSLKSRVT |
| | ISVDTSKNQFSLKLSSVTAADTAVYYCARSPITMI |
| | VVVNAFDIWGQGTMVTVSS |
| 748 | QVQLQESGPGLVKPSQTLSLTCTVSGGSISSGGYY |
| | WSWIRQHPGKGLEWIGYIYYSGSTYYNPSLKSRVT |
| | ISVDTSKNQFSLKLSSVTAADTAVYYCARARITMI |
| | VVVNHFDYWGQGTLVTVSS |
| 749 | EVQLVESGGRSVQPGGSLRLSCEASGFTVSSNYMN |
| | WVRQAPGKGLEWLSVLYSGGNEYYADSVRGRFTIS |
| | RHSSKNTLFLQMNRLRPEDTAVYYCARVQSTGYKY |
| | WYFDIWGRGTLVIVSS |
| 750 | QVQLQESGPGLVKPSETLSLTCTVSGGSISSYYWS |
| | WIRQPPGKGLEWIGYIYYSGSTNYNPSLKSRVTIS |
| | VDTSKNQFSLKLSSVTAADTAVYYCARGFDYWGQG |
| | TLVTVSS |
| 751 | QVQLVQSGAEVKKPGASVKVSCKASGYTFTGYFIY |
| | WVRQAPGQGLEWMGRINPSSGVANYAQKFQGRVTM |
| | TRDTSITTAYMELSRLTSDDTVVYYCARARDYGSG |
| | SPMDVWGQGTTVTVSS |
| 752 | EVQLVESGGGLVQPGGSLRLSCVASGFTASSNYMN |
| | WVRQAPGKGLEWVSVIYAGGGTHYADSVKGRFTIS |
| | RDNFKNTVYLQMNSLRSEDTAVYYCARDGVYYGSV |
| | IYHHYDLHVWGQGTTVTVSS |
| 753 | QVQLVQSGPEVKKPGSSVKVSCKVSGGTFSSYGIS |
| | WVRLAPGRGLEWMGRILPVLDTTTYAPKFEGRVTI |
| | TADESTTTAYMELTSLKSDDTAVYYCARGGGELLR |
| | YPFDYWGQGTPVTVSS |
| 754 | QVHLVQSGPEVKKPGSSVKVSCKASGGRFGSFAFS |
| | WLRQAPGQGLEWMGKVTPIVGVPVYAEKFQGTVTI |
| | SADESTNTAYMEVSSLRSEDTALYYCAKAGLGLET |
| | SGGNYFESWGQGTLVTVSS |
| 755 | QVRLVESGGGLVQPGRSLRLSCAASGFTFTDYAIH |
| | WVRQAPGKGLEWMATISYDGNDKYFAASVRGRFSI |
| | SRDNSNNTLFLQMNNLRAEDTAVYYCAKDRVTMNY |
| | FDYWGQGTLVSVSS |
| 756 | QVQLQESGPGLVKPSETLSLTCTVSGGSISSYYWS |
| | WIRQPPGKGLEWIGYIYYSGSTNYNPSLKSRVTIS |
| | VDTSKNQFSLKLSSVTAADTAVYYCARVREGYTSG |
| | WYADYWGQGTLVTVSS |
| 757 | QVQLVQSGAEVQKPGASVRVSCKASGYTFTDYYIH |
| | WVRQAPGQGLEWMGWVNPNRGGTNNAQKFQGRVTM |
| | TRDTSITTAYMELHSLRSDDTAVYYCARDRSYYHS |
| | SGYHYYFDYWGQGSLVTVSS |
| 758 | QVQLVQSGAEVKKPGASVKVSCKASGYSFTGHYIH |
| | WVRQAPGQGLEWMGWINPDSGGTNNAQKFQGRVTM |
| | ARDTSISTAYMDLSTLTNDDTAVYYCVRDRIVGGY |
| | SYGGDYWGQGTLVTVSS |
| 759 | EVQLLESGGGLVQPGGSLRLSCAASGFTFSNYGMS |
| | WVRQAPGKGLEWVSAITGSGGSTHYADSVKGRFTI |
| | SRDNSNNTLSLQMNSLRAEDTAVYYCAKGRLSPRL |
| | GQGTLVTVSS |
| 760 | QLQLKESGSGLVKSSQTLSLTCAVSGGSISSDVYS |
| | WSWIRQAPGKGLEYIGYVFHTGSAYYNPSLKSRVI |
| | ISVDRSKNQVSLNVTSVTAADTAIYYCARVKVDNV |
| | VFDLWGQGTMVTVSS |
| 761 | QVQLVQSGTEVKKPGSSVKVSCKASGDTFNSYAIS |
| | WVRQAPGQGLEWMGRIIPILRLATYAQEFQGRVTI |
| | TADKSTTTTYMEVTSLKSEDTAIYYCARDRGLAAR |
| | PAGWVDLWGQGTLVTVSS |
| 762 | QTQLVESGGGVVQPGRSLRLSCAASGFTFSHYGMH |
| | WVRQAPGKGLEWVALIWYDGSKKYYADSVKGRFTI |
| | SRDISENTLYLQMNSLRAEDTAVYYCARENFHFSG |
| | TPPLYWGQGTLVTVSS |
| 763 | EVQLVQSAAEQKKPGESLKLSCKGSGYSFPAHWID |
| | WVRQMPGGGLEWVGSIFPGDSDTKYSPSFEGQVNI |
| | SADRSINTAYLQWSSLKASDTAIYYCARKYTYDTS |
| | GFFLSSSRNAFDVWGQGSMVFVSS |
| 764 | EVQLVQSGAEVKKPGESLKISCKGSGYNFDTYWIA |
| | WVRQTPGKGLEWMGDIYPGDSDSRYSPSFQGRVTF |
| | SADKSISVAYLQWSTLKASDTAMYFCARLGSNGYG |
| | LWGQGTLITVSS |
| 765 | EVQLVQSGAEVKEPGESLKISCKGSGYSFSGYWIA |
| | WVRQRPGKGLEWMGTIFPSDSDTRYSPSFEGQVTI |
| | STDKSISTAYLQWSSLKASDTAMYYCARTYSYDSS |
| | GFFLTSSREAFDIWGQGTMVIVSS |
| 766 | EVQLVQSGAEVKKPGESLKISCKASGYYFAAHWID |
| | WVRQMPGRGLEWMGSIFPSDSDTEYGPSFQGQVNI |
| | SADKSITTAYLQLKNLKASDTALYYCVRKYSFDVS |
| | GFFLSSSRHAFDVWGQGTMVTVSS |
| 767 | EVHLVQSGPEQKKPGESLRISCKGSGYSFPAFWIV |
| | WVRQMPGEGLEWMGSVFPGDSDTEYSPSFQGQVTI |
| | SADKSISTAYLQWSSLKASDTAMYYCARKYSYDTS |
| | GFFLTSSRDAFDVWGQGTMIAVSS |
| 768 | DVQLVQSGAEEKKPGEFLKISCKGSGYSFPAYWIG |
| | WVRQMPGKGLEWMGSIFPGDSDTEYSPSFQGHVTI |
| | SADKSISTAYLQWSSLKASDTAMYYCVRKFSYDIS |
| | GFFLTSSRDAFDVWGQGTKVTISS |
| 769 | QVQLVQSGAEVKKPGASVKVSCKVSGYTLTELSMH |
| | WVRQAPGKGLEWMGGFDPEDGETIYAQKFQGRVTM |
| | TEDTSTDTAYMELSSLRSEDTAVYYCATEGVWGQG |
| | TTVTVSS |
| 770 | QVQLVQSGAEAKKPGASVKVSCKASGYTFTRYWMH |
| | WVRQGPGQGLEWMGLMKPGDGKTIYAQKFQYRVTL |
| | TRDTSTSTVYMELRSLTSADTAMYYCLLIEGMGAT |
| | SGDWGQGTLVTVSS |
| 771 | EVQLVESGGGLVKPGGSLRLSCAASGFTFSSYSMN |
| | WVRQAPGKGLEWVSSISSSSSYIYYADSVKGRFTI |
| | SRDNAKNSLYLQMNSLRAEDTAVYYCATTNDGYYY |
| | GMDVWGQGTTVTVSS |
| 772 | EVQLVESGGGLVQPGGSLRLSCAASGFTFSSYSMN |
| | WVRQAPGKGLEWVSYISSSSSTIYYADSVKGRFTI |
| | SRDNAKNSLYLQMNSLRAEDTAVYYCATNPHNTAM |
| | VLDYYGMDVWGQGTTVTVSS |
| 773 | QLQLQESGPGLVKPSETLSLTCTVSGGSISSSSYY |
| | WGWIRQPPGKGLEWIGSIYYSGSTYYNPSLKSRVT |
| | ISVDTSKNQFSLKLSSVTAADTAVYYCAGAYIAAA |
| | GWGWELFQYYFDYWGQGTLVTVSS |
| 774 | QITLKESGPTLVKPTQTLTLTCTFSGFSLSTSGVG |
| | VGWIRQPPGKALEWLALIYWDDDKRYSPSLKSRLT |
| | ITKDTSKNQVVLTMTNMDPVDTATYYCAHQAPFEW |
| | FGVDYWGQGTLVTVSS |
| 775 | EVQLVESGGGLVKPGGSLRLSCAASGFTFSNAWMS |
| | WVRQAPGKGLEWVGRIKSKTDGGTTDYAAPVKGRF |
| | TISRDDSKNTLYLQMNSLKTEDTAVYYCTTDGLYC |
| | SGGSCYYHSYYYYYGMDVWGQGTTVTVSS |
| 776 | EVQLVESGGGLVQPGGSLRLSCAASGFTFSSYEMN |
| | WVRQAPGKGLEWVSYISSSGSTIYYADSVKGRFTI |
| | SRDNAKNSLYLQMNSLRAEDTAVYYCARDGLGNYD |
| | ILTGYTERAFDIWGQGTMVTVSS |
| 777 | EVQLVESGGGLVQPGGSLRLSCAASGFTFSSYEMN |
| | WVRQAPGKGLEWVSYISSSGSTIYYADSVKGRFTI |
| | SRDNAKNSLYLQMNSLRAEDTAVYYCARVKPILRV |
| | VVVAATPCDYWGQGTLVTVSS |
| 778 | QLQLQESGPGLVKPSETLSLTCTVSGGSISSSSYY |
| | WGWIRQPPGKGLEWIGSIYYSGSTYYNPSLKSRVT |
| | ISVDTSKNQFSLKLSSVTAADTAVYYCARHARGYQ |
| | LLSPRLGELSLYRSFDYWGQGTLVTVSS |
| 779 | QVQLQESGPGLVKPSQTLSLTCTVSGGSISSGGYY |
| | WSWIRQHPGKGLEWIGYIYYSGSTYYNPSLKSRVT |
| | ISVDTSKNQFSLKLSSVTAADTAVYYCARATTTKM |
| | IVVVINAFDIWGQGTMVTVSS |
| 780 | QLQLQESGPGLVKPSETLSLTCTVSGGSISSRSYY |
| | WGWIRQPPGKGLEWIGSIYYSGSTYYNPSLKSRVT |
| | ISVDTSKNQFSLKLSSVTAADTAVYYCARHWITMI |
| | VVVIKGGWFDPWGQGTLVTVSS |
| 781 | QVTLKESGPVLVKPTETLTLTCTVSGFSLSNARMG |
| | VSWIRQPPGKALEWLAHIFSNDEKSYSTSLKSRLT |
| | ISKDTSKSQVVLTMTNMDPVDTATYYCARIRGQWL |
| | VGKYYYGMDVWGQGTTVTVSS |
| 782 | QITLKESGPTLVKPTQTLTLTCTFSGFSLSTSGVG |
| | VGWIRQPPGKALEWLALIYWDDDKRYSPSLKSRLT |
| | ITKDTSKNQVVLTMTNMDPVDTATYYCAHRGWGFS |
| | SSFFDYWGQGTLVTVSS |
| 783 | QVQLVESGGGVVQPGRSLRLSCAASGFTISPYGMH |
| | WVRQAPGKGLECVAIIWYDGSNKYYADSVKGRFTI |
| | SRDSSKNTLYLQMDRLRAEDTAVYYCARMSSSLQH |
| | YYGMDVWGQGTTVTVSS |
| 784 | QVQLVESGGGVVQPGRSLRLSCAASGFTISPYGMH |
| | WVRQAPGKGLECVAIIWYDGSNKYYADSVKGRFTI |
| | SRDSSKNTLYLQMDRLRAEDTAVYFCARMSSSLQH |
| | YYGMDVWGQGTTVTVSS |
| 785 | QVQVVQSEGEVKKPGASVKVSCMASGYTFGDYGIS |
| | WVRQAPGQGLEWMGWISGYNGDPKYAQKFQGRITL |
| | TTDAATSSAYMELRSLRSDDTAVYFCARDVTLVRG |
| | TASPRFDYWGQGTLITVSS |
| 786 | QVQVVQSEGEVKKPGASVKVSCMASGYTFGDYGIS |
| | WVRQAPGQGLEWMGWISGYNGDPKYAQKFQGRITL |
| | TTDAATSSAYMELRSLRSDDTAVYFCARDVTLVRG |
| | TASPRFDYWGQGTLITVSS |
| 787 | QITLKESGPTLVKPTQTLTLTCTFSGFSLSTSGVG |
| | VGWIRQPPGKALEWLALIYWDDDKRYSPSLKSRLT |
| | ITKDTSKNQVVLTMTNMDPVDTATYYCAQEGRNYD |
| | RNWFDPWGQGTLVTVSS |
| 788 | QVRLQESGPGLVKPSETLSLTCTVSGGSISTYRWS |
| | WIRQPPGKGLEWIGYIYYSGRTNYHPSLKSRVTMS |
| | VDTSKNQFSLKLTFVSAADTAVYYCARLIPIDGRD |
| | VWGRGTTVTVSS |
| 789 | EVQLVESGGGLVEPGGSLRLSCAASGFTFSNAWMC |
| | WVRQAPGKGLEWVGRIKRIIDGGTINYAAPVKGRF |
| | TISRDDSTNTVYLQMNSLRSEDTAVYYCTTYWDQY |
| | TSTWTWGQGTLVTVSS |
| 790 | QVQLVQSGSELKKPGASVKVSCKASGYIFTNYAIN |
| | WVRQAPGQGLEWMGWTNTNTGNPTYAQGFTGRFVF |
| | SLDTSVSTAYLQISSLKAEDTAVYYCASIVKYDSS |
| | GYNFDYWGQGTLVTVSS |
| 791 | QVQLVQSGAEVKKPGASVKLSCKTSGYAFTSYQVH |
| | WVRQAPGQGLEWMGMINPSGSATHYAQKWQGRVSM |
| | TADTSTTTVYMELSGLRSEDTAVYYCTRDPWHESE |
| | HRFDPWGQGTLVTVSS |
| 792 | EVQLVESGGGLVQPGRSLRLSCAASGFTFGDYAMH |
| | WVRQVPGKGLEWVSSITWNSGNIGYADSVKGRFTI |
| | SRDNAKNSLYLQMNSLRIEDTALYYCAKDNKVSSW |
| | YSFDIWGQGTMVTVSS |
| 793 | QVQLQQWGAGLLKPSETLSLTCAVSGASFSSYYWT |
| | WIRQPPGKGLEWIGDISQSASTNYSPSLKSRVTIS |
| | ADASRTQFSLNLISVTAADTAVYYCARGLGYYVAL |
| | GQGTLVTVSS |
| 794 | EVQLVQSGVEVKEPGESLKISCKSSGYSFTKYWIG |
| | WVRQMPGKGLEWLGIIYPDDSETRYSPSFRGQVTI |
| | SADKSISTAYLAWDRLKASDTAIYYCVRGGQEVSL |
| | RRLDWFVGYWGQGTLVTVSS |
| 795 | EVQLLESGGGLVQPGGSLRLSCAASGFTFSSYAMS |
| | WVRQAPGKGLEWVSSISGSGDKTYYADSVKGRFTI |
| | SRDNSKNTLYLQMNSLRAEDTALYYCAKERGGSGK |
| | MYDYWGQGNLVTVSS |
| 796 | QVQLQQSGPGLLKPSQTLSLTCAISGDSVSSNTVA |
| | WSWIRQSPSRGLEWLGRTYYRSNWYNDYAVSVKGR |
| | ITLNSDTSKNQLSLQLNSVTPEDTAVYYCARRGAA |
| | VAGTTGGSAFDIWGQGTMVTVSS |
| 797 | EVQLVESGGGLVQPGRSLRLSCAASGFTFDDYGMN |
| | WVRQAPGKGLEWVSGISWNSNSVAYADSVNGRFTI |
| | SRDNAKNSLYLQMNSLRIEDTAFYYCTKTSDLLYY |
| | GSGSYLPYWGQGTLVVVSS |
| 798 | AVQLVESGGGFVQPGRSLRLSCAGSGFAFDDFAMH |
| | WVRQAPGKGLEWVSGINWNSDNIAYAASVKGRFIV |
| | SRDNGKNSLYLQMNSLRPEDTALYYCTRDGGAWDW |
| | GRGTLVTVSS |
| 799 | EVQVVESGGGLVQPGGSLRLSCAASGFTVSSTFMS |
| | WVRQAPGKGLEWVSVIYTVGDTFYADSVKGRFTIS |
| | RHTSNNALYFQMNSLRTEDTAVYYCARGIPREYTT |
| | RWENAFDIWGQGTMVTVSS |
| 800 | QVQLQESGSGLVKPSQTLSLTCSVSGGSIKRRGYY |
| | WSWIRQHPGKGLEWIGYIYYSGTTYYNPSLQSRVN |
| | ISVDTSKNQFSLNLRSVTAADTAVYYCARDRGADK |
| | DSNSGDVFDIWGQGTMVTVSS |
| 801 | QVQLQQWGAGLLKPSETLSLTCAVYGGSFSAYYWS |
| | WIRQPPGKGLEWIGEINRRGNTNYNPSLKGRVTIS |
| | IHTSKNQFSLNLSSMTAADTAVYYCVGPQGAYWGQ |
| | GTLVTVSS |
| 802 | QLQLQESGPGLVKPSETLSLTCVVSGGSISSSDYY |
| | WGWIRQPPGKGLEWIGTIYYSGNTFYNPSLKSRVT |
| | MSVDPSKNQFSLKLSSVTAADTAVYYCARDPRGSS |
| | TSCSYDYWGQGTLVTVSS |
| 803 | EVQLVESGGGLVKPGGSLRLSCAASGFTFSNAWMS |
| | WVRQAPGKGLEWVGRIKSKTDGGTTDYAAPVKGRF |
| | TISRDDSKNTLYLQMNSLKTEDTAVYYCTGQERIT |
| | IFGVVIISSDYWGQGTLVTVSS |
| 804 | QVHLVQSGAEVKKPGSSVKVSCKASGGTFSTYAIS |
| | WVRQAPGQGLEYMGGIIPSLRTANYAQRFQDRVSI |
| | TADESTTTAYMELSSLRSDDTAVYYCARRLNDGAN |
| | HSWGQGTRVTVSS |
| 805 | EVQLVQSGGGLVKPGESLRLSCAVSGLRFTDAWLN |
| | WVRQAPGKGLEWVGRIKSRGSGGTIELAAPVKGRF |
| | TISRDDSKSTLFLQMNSLRTEDTAIYYCSWDATVY |
| | YDMAVWGQGTTVTVSS |
| 806 | QVQLVESGGGVVQPGGSLRLSCAASGFSFSSYALH |
| | WVRQAPGKGLEWVALISYDGRNKYYADSVKGRFTI |
| | SRDNSKKTLYLQMSTLTAEDTAVFYCARPSSGSYA |
| | DPFDIWGQGTMVTVSS |
| 807 | QTVVESGGAVVQPGKSLTLSCEASGFSFSDFAMHW |
| | VRQSPGKGLEWVAVVSYDSRQQYYADSVQGRFRIS |
| | RDNSQYTVTLRMDTLSFEDTGIYFCVASRSSSLDY |
| | WGQGTRVTVSS |
| 808 | QIQLVESGGGVVQPGRSLRLSCAASGFTFTTYGFH |
| | WVRQAPGKGLEWVAVIWYDGSNEAYADSVKGRITI |
| | SRDNSRNTVYLQMNSLRAEDTAIYHCARSRGYGGL |
| | AGVDYWGQGTLVTVSS |
| 809 | DVQLVESGGGLVQPGGSLRLSCLATGFTFRSYSMN |
| | WVRQAPGKGLEWISYLSNDDRTRKYADSVNGRFTI |
| | SRDNDGSSLFLQMDSLRDEDTAIYYCARAYFDDSS |
| | GGFDYWGQGALVIVSS |
| 810 | QVQLQESGPGLVKPAETLSLTCTVSGDSITSYYWS |
| | WIRQPAGKGLEWIGRIYSSGDTNYDPSLKSRVTMS |
| | VDTSKDQFSLRLSSVTAADTAIYYCAGSTYGDYVP |
| | HFYFWGQGTLVTVSS |
| 811 | QVQLQQWGAGLLKPSETLSLTCAVYGGSFSGSYWS |
| | WIRQSPGKGLEWIGEINPSGGSNYNPSLKSRVIIS |
| | LDTSKNQFSLKLNSVTAADTAVYYCARGLSSFTTI |
| | VVVFVGASFYFDSWGQGTLATVAS |
| 812 | QVQLQQWGAGLLKPSETLSLTCAVSGGSFTDHYWT |
| | WIRQPPGKGLEWIGEINHSGRTNYSPSLKSRVTMS |
| | LDTSKNQFSLKLRSVTAADTGIYYCARGTTSTTMI |
| | VIVITAVSTWFDPWGQGTLVTVSS |
| 813 | QLQLQESGPGLVKPSETLSLTCTVSGGSISSSSYY |
| | WGWIRQPPGKGLEWIGSIYYSGSTYYNPSLKSRVT |
| | ISVDTSKNQFSLKLSSVTAADTAVYYCARHPLKVD |
| | TIFGVVIIDPAPFDYWGQGTLVTVSS |
| 814 | QVTLKESGPVLVKPTETLTLTCTVSGFSLSNARMG |
| | VSWIRQPPGKALEWLAHIFSNDEKSYSTSLKSRLT |
| | ISKDTSKSQVVLTMTNMDPVDTATYYCARIASYYY |
| | DSSGYYQTRPIGHAFDIWGQGTMVTVSS |
| 815 | QVQLVESGGGVVQPGRSLRLSCAASGFTFSSYGMH |
| | WVRQAPGKGLEWVAVISYDGSNKYYADSVKGRFTI |
| | SRDNSKNTLYLQMNSLRAEDTAVYYCAKDRAQLLW |
| | FGQSRGMDVWGQGTTVTVSS |
| 816 | EVQLVESGGGLVKPGRSLRLSCTASGFTFGDYAMS |
| | WFRQAPGKGLEWVGFIRSKAYGGTTEYAASVKGRF |
| | TISRDDSKSIAYLQMNSLKTEDTAVYYCTSTSDWW |
| | GQGTLVTVSS |
| 817 | EVQLVESGGGLVQPGGSLKLSCAASGFTFSGSAMH |
| | WVRQASGKGLEWVGRIRSKANSYATAYAASVKGRF |
| | TISRDDSKNTAYLQMNSLKTEDTAVYYCTRLRSGL |
| | VGFDWLPLYGMDVWGQGTTVTVSs |
| 818 | EVQLVQSGAEVKKPGESLRISCKGSGYSFTSYWIS |
| | WVRQMPGKGLEWMGRIDPSDSYTNYSPSFQGHVTI |
| | SADKTISTAYLQWSSLKASDTAMYYCARRGVGILK |
| | DLPVYAMDVWGQGTTVTVSs |
| 819 | QVQLVQSGAEVKKPGASVKVSCKASGYTFTSYYMH |
| | WVRQAPGQGLEWMGIINPSGGSTSYAQKFQGRVTM |
| | TRDTSTSTVYMELSSLRSEDTAVYYCAREARQIFI |
| | TMMTTKTSWFDPWGQGTLVTVSS |
| 820 | QVRLVQSGAEVKKPGSSVKVSCKASGGTFSSYAIS |
| | WVRQAPGQGLEWMGRIIPIFHIANSAQKFQGRVTI |
| | TADKSTSTAYMELSSLRSEDTAVYYCARVSSTAVV |
| | TGLDYYYGMDVWGQGTTVTVSS |
| 821 | EVQLVESGGGLVKPGGSLRLSCAASGFTFSNAWMS |
| | WVRQAPGKGLEWVGRIKSKTDGGTTDYAAPVKGRF |
| | TISRDDSKNTLYLQMNSLKTEDTAVYYCTTISVGL |
| | LWFGLAVRDHYYFDYWGQGTLVTVSS |
| 822 | EVQLVESGGGSVRSGGSLRLSCAASGFTFRSYWMH |
| | WVRQAPGKGLVWVSRIFSDWSTTTYADSVRGRFTI |
| | SRDNAKNTLYLEMNRLKVEDTAVYYCARSYYDSST |
| | GYYPDALDLWGQGTTVTVSS |
| 823 | EVQLLESGGGLVQPGGSLRLSCAASGFTFSTYAMS |
| | WVRQAPGKGLEWVAAISGSGGSTYYADSVKGRFTI |
| | SRDNSKNTLYLQMNSLRAEDTAVYYCAKSGSVWGS |
| | YHKTYYFDYWGQGTLVTVSS |
| 824 | QVQLVESGGGVVQPGRSLRLSCAASGFTFSSYGMH |
| | WVRQAPGKGLEWVAVISYDGSNKNYADSVKGRFTI |
| | SRENSKNTLYLQMNSLRAEDTAVYYCAKEILKGYS |
| | SGWKYYYYGMDVWGQGTTVTVSS |
| 825 | EVQLVESGGGLIQPGGSLRLSCAASGFTVSSNYMN |
| | WVRQAPGKGLEWVSVIYSGSSTYYADSVKGRFTIS |
| | RDNSKNTLYLQMNSLRAEDTAVYYCARATTTMVRG |
| | VIYHYYYYGMDVWGQGTTVTVSS |
| 826 | QVQLQESGPGLVKPSQTLSLTCTVSGGPISSGGYY |
| | WSWIRQHPGKGLEWLGCIYYSGSTYYNPSLKSRVS |
| | ISVDTSKSQFSLKLSSVTAADTAVYYCARERLGRM |
| | VRGVNWFDPWGQGILVTVSS |
| 827 | QLQLQESGPGLVKPSETLSLTCTVSGGSISSSYYY |
| | WGWIRQPPGKGLEWIGSIYYSGSTYYNPSLKSRVT |
| | ISVDTSKNQFSLKLSSVTAADTAVYYCASWTMVRG |
| | VIRWFDPWGQGTLVTVSS |
| 828 | QLQLQESGPGLVKPSETLSLTCTVSGGSISSSSYY |
| | WGWIRQPPGKGLEWIGSIYYSGSTYYNPSLKSRVT |
| | ISVDTSKNQFSLKLSSVTAADTAVYYCARQFHYVG |
| | IVVVVAPHYYYGMDVWGQGTTVTVSS |
| 829 | EVQLVESGGGLVKPGGSLRLSCAASGFTFSSYSMN |
| | WVRQAPGKGLEWVSSISSSSSYIYYADSVKGRFTI |
| | SRDNAKNSLYLQMNSLRAEDTAVYYCASPRGYSYG |
| | PFDYWGQGTLVTVSS |
| 830 | QVQLVQSGAEVKKPGASVKVSCKASGYTFTSYGIS |
| | WVRQAPGQGLEWMGWISAYNGNTNYAQKLQGRVTM |
| | TTDTSTSTAYMELRSLRSDDTAVYYCARVLYYDIL |
| | TGYWWYYYGMDVWGQGTTVTVSS |
| 831 | EVQLVESGGGLVQPGGSLRLSCAASGFTFSSYWMH |
| | WVRQAPGKGLVWVSRINSDGSSTSYADSVKGRFTI |
| | SRDNAKNTLYLQMNSLRAEDTAVYYCARGAPITIF |
| | GVVISTWFDPWGQGTLVTVSS |
| 832 | QLQLQESGSGLVKPSQTLSLTCAVSGGSISSGGYS |
| | WSWIRQPPGKGLEWIGYIYHSGSTYYNPSLKSRVT |
| | ISVDRSKNQFSLKLSSVTAADTAVYYCARAHTDSL |
| | ELGIWGQGTMVTVSS |
| 833 | EVQLLQSGGEVRRPGESLKISCKASGYSFPAHWIG |
| | WVRQMPGRGLEWMGSIFPSDSDTEYSPSFEGQVKI |
| | SADKSITTAYLQWSSLKASDTAFYYCVRKYTYDTS |
| | GFFLTSTRSAFDVWGQGTMVTVSS |
| 834 | EVQLEQSGAEEKKPGESLKISCKGSGYSFPAFYIA |
| | WMRQMPGKGLEWMGSIFPGDSETEYNPSFQGQVTI |
| | SADKSITTAYLQWDNLKASDTALYYCARKHVYDTS |
| | GFFLSSSRNAFDVWGQGTKVTVFS |
| 835 | EVQLVQSGAEQRKPGESLRISCKGSGYSFPAHWIA |
| | WVRQMPGRGLEWMGSIFPGDSDTEYNPSFQGHVNI |
| | SADRSINTAYLQWSSLKASDSAIYYCARKYSFDIS |
| | GFFLSSSRYALDVWAQGTTVTVSS |
| 836 | DMQLVESGGGLVQPGGSLKLSCAASGFTFSASAIH |
| | WVRQASGKGLEWVGHIRTRTNRYATAFSESVNGRF |
| | TISRDDSKSTAYLQMNSLKAEDTAVYYCARDEGVT |
| | FHDHWANEIRYGMDVWGRGTTVTVSS |
| 837 | QVQLQESGPGLVKPSQTLSLTCTVSGGSISSGGYY |
| | WSWIRQHPGKGLEWIGYIYYSGSTYYNPSLKSRVT |
| | ISVDTSKNQFSLKLSSVTAADTAVYYCARARTTMI |
| | VVVSQFDYWGQGTLVTVSS |
| 838 | EVQLVESGGGLVQPGGSLRLSCAASGFTFSSYWMH |
| | WVRQAPGKGLVWVSRINSDGSSTSYADSVKGRFTI |
| | SRDNAKNTLYLQMNSLRAEDTAVYYCARDRGGWLL |
| | GSYYYYGMDVWGQGTTVTVSs |
| 839 | QVQLVQSGAEVKKPGASVKVSCKASGYTFTSYGIS |
| | WVRQAPGQGLEWMGWISAYNGNTNYAQKLQGRVTM |
| | TTDTSTSTAYMELRSLRSDDTAVYYCARGQISHYG |
| | FGESHWGQGTLVTVSS |
| 840 | QITLKESGPTLVKPTQTLTLTCTFSGFSLSTSGVS |
| | VGWIRQPPGKALEWLALIYWDDDKRYSPSLKSRLT |
| | ITKDTSKKQVVLTLTNMDPVDTASYYCAHSGIAVV |
| | GNQLFHYYAMDVWGQGTTVTVSS |
| 841 | QVQLVESGGGVVQPGRSLRLSCAASGFTFSSYGMH |
| | WVRQAPGKGLEWVAVISYDGSNKYYADSVKGRFTI |
| | SRDNSKNTLYLQMNSLRAEDTAVYYCAKERSSGSQ |
| | WGWTYYYYGMDVWGQGTTVTVSS |
| 842 | QVQLVESGGGVVQPGRSLRLSCAASGFTFSSYAMH |
| | WVRQAPGKGLEWVAVISYDGSNKYYADSVKGRFTI |
| | SRDNSKNTLYLQMNSLRAEDTAVYYCARDPYGGNR |
| | RFHGWVYYYYGMDVWGQGTTVTVSS |
| 843 | EVQLVESGGGLVQPGGSLRLSCAASGFTFSSYEMN |
| | WVRQAPGKGLEWVSYISSSGSTIYYADSVKGRFTI |
| | SRDNAKNSLYLQMNSLRAEDTAVYYCARESTPDVR |
| | GVMNYWGQGTLVTVSS |
| 844 | EVQLLESGGGLVLPGGSLRLSCAASGFTFSIYAMS |
| | WVRQAPGKGLEWVSAISGSGGSTYYADSVKGRFTI |
| | SRDNSKNTLYLQMNSLRAEDTAVYYCAKDAVASAG |
| | SPDYWGQGTLVTVSS |
| 845 | QVQLVESGVGVVQPGKSLRLSCAASGFTFTSYGMH |
| | WVRQAPGKGLEWVAVISFDGSNIYYADSVKGRFTI |
| | SRDNFKNTLYLQMNSLRAEDTAVYYCARDKLLWFG |
| | EPVVGYYYYYYMDVWGKGTTVTVSS |
| 846 | QVQLVESGGGVVQPGRSLRLSCAASGFTFSSYGMH |
| | WVRQAPGKGLEWVAVISYDGSNKYYADSVKGRFTI |
| | SRDNSKNTLYLQMNSLRAEDTAVYYCARDGGGDYA |
| | QIYFDYWGQGTLVTVSS |
| 847 | QVQLVESGGGVVHPGRSLRLSCAASGFAFNKYGIH |
| | WVRQAPGKGLEWVALIWNDGNKQYYGDSVKGRFTV |
| | SRDNSKNTVSLQMDTLRDEDTAVYYCARDRLMTTY |
| | NYYSSMDVWGRGATVIVSS |
| 848 | QVQLVESGGGVVQPGRSLRLSCAASGFTFSSYGMH |
| | WVRQAPGKGLEWVAVIWYDGSNKYYADSVKGRFTI |
| | SRDNSKNTLYLQMNSLRAEDTAVYYCAREPGDCSG |
| | GSCYYYGMDVWGQGTTVTVSS |
| 849 | QLQLQESGPGLVKPSETLSLTCTVSGGSISSSSYY |
| | WGWIRQPPGKGLEWIGSIFYSGSTYYNPSLKSRVT |
| | ISVDTSKNQFSLKLSSVTAADTAVYYCARATRGYS |
| | YDDAFDIWGQGTMVTVSS |
| 850 | QVQLQESGPGLVKPSGTLSLTCSVSGGAITTSSYF |
| | WGWIRQPPGRGLEWIGSISYSGDTFYNPSLNDRVT |
| | ISVDSSKNQFFLKLRSVTAADSAVYYCASPSYTDL |
| | LTGYYVPVDYWGQGILVIVSS |
| 851 | QVHLVESGGGVVQPGKSLTLSCAASGFTFSAYGMH |
| | WVRQTPGKGLEWVALISFDGSNKYYRDSVKDRFTI |
| | ARDNSKNTLSLQMNSLRPEDTAIYYCAKDPRVNEL |
| | LWFGSLTQFYFDDWGQGTLVTVSS |
| 852 | QVQLVESGGGVVQPGRSLTLSCAASGFTFNNYGMH |
| | WVRQAPGKGLEWLALISYEGSIRYYGDSVKGRFTI |
| | SRDSSKNTVYLQMISLRAEDTAVYYCAKSGGPFHL |
| | SLYYYMDVWGKGTTVTVSS |
| 853 | QVQLQESGPGLVKPSETLSLTCTVSGGSINSYYWS |
| | WIRQTAGQGLEWIGRIYSGGSTNYNPSLKSRVTMS |
| | VDTSQNQFSLNLNSVTAADTAVYYCARAFYGHAFD |
| | FWGLGVLVIVSS |
| 854 | QVQLVESGGGVVHPGRSLRLSCAASGFTFSRFGMH |
| | WVRQAPGKGLEWVALISYEGSTEQYSDSVKGRFAI |
| | SRDNSKNTLYLQMNSLRPEDTAVYYCAKGLTIPFD |
| | KWGHGTLVTVSS |
| 855 | QVQLVESGGGVVHPGRSLRLSCAASGFTFSRFGMH |
| | WVRQAPGKGLEWVALISYEGSTEQYSDSVKGRFAI |
| | SRDNSKNTLYLQMNSLRAEDTAVYYCAKGLTIPFD |
| | KWGHGTLVTVSS |
| 856 | EVQLVESGGGLVQPGGSLRLSCAASGFTFSSFWMT |
| | WFRQTPGKGLEWVANIKEDGSEKQYVDSVKGRFNI |
| | SRDNAHNSLYLEMNSLRSEDAAVYYCARRGKYCSG |
| | GRCYSWWFDPWGQGTQVTVSS |
| 857 | QVQLVQSGGEMRKPGSSVKVSCKASGGTFSSYTIS |
| | WVRQAPGQGLEWMGRIIPMLNKTYYAQKFQGRVTF |
| | AADESTSTVYMELSSLRSEDTAMYYCARVASLIGD |
| | DYWGQGSLVTVSS |
| 858 | QVQLVQSGGEMRKPGSSVKVSCKASGGSFSSYTIS |
| | WVRQAPGHGLEWMGRIIPMLNKTYYAQKFQGRVTV |
| | AADESTSTVYMELSSLSSEDTAIYYCARVASLIGD |
| | DYWGQGSLVTVSS |
| 859 | QITLKESGPTLVKPTQTLTLTCTFSEFSLDSRGVG |
| | VGWIRQPPGRALEWLALIYWNDNKRYNPSLRSRLT |
| | ITKDTSKNQVVLTMSNMDPVDTATYYCAHKPSGWS |
| | LRFDSWGQGTLVTVSS |
| 860 | QVQLQEAGPGLVKPSETLSLTCSVFGGSISSYYWS |
| | WIRQPPGKGLEWIGYIYYRGSTNYNPSLKSRVTMS |
| | VDTSKNQFSLNLTSVTAADTAVYFCARESLFNWFD |
| | SWGHGTLVTVSS |
| 861 | QVQLVESGGGVVQPGRSLRLSCAASGFTFSRYGMH |
| | WVRQAPGKGLEWVALISYEGSTEQYSDSVKGRFAI |
| | SRDNSKNTLYLQMNSLRHEDTAVYYCAKGLTIPFD |
| | NWGQGTLVTVSS |
| 862 | EVQLVESGGGLVQTGGSLRLSCAASGFPFSGYALN |
| | WVRQAPGKGLEWVSYISSSSSTVYYADSVKGRFTI |
| | SRDNAKNSLYLQMNSLRDEDTAVYYCARVDYDSSR |
| | NYWGQGTLVTVSS |
| 863 | EVQLVESGGGLVQPGGSLRLSCAASGFTFINYDMT |
| | WVRQAPGKGLEWISYISSSSSTTHYSDSVKGRFTI |
| | SRDNARNSLYLEMNSLRAEDTAVYYCARVERWLVL |
| | GYYYYGMDVWGQGTTVTVSS |
| 864 | EVQLVESGGGLVQPGESLRLSCVASGFAFDKFWMA |
| | WLRQAPGKGLEWVALLNKDESEKYYVDSVKGRFTI |
| | SRDNAIDSVFLQMNSLRTEDTAVYYCGSIDYWGQG |
| | ALVTVSS |
| 865 | QVQLQESGPGLVKPSQTLSVTCTVSGGSINRDGHY |
| | WIWIRQHPEKGLEWLGYIYSGRNTFYNPSLRSRLS |
| | ISADTSKSQFSLNLHSVTAADTAVYYCAKMYSDYD |
| | DNYYGLDVWGRGTTVTVSS |
| 866 | QVQLQESGPGLVKPSETLSLTCTVSGGSISSYYWS |
| | WIRQPPGKGLEWIGYIYYSGSTNYNPSLKSRVTIS |
| | VDTSKNQFSLKLSSVTAADTAVYYCARDRYCSSTS |
| | CGGYYYYMDVWGKGTTVTVSS |
| 867 | QVQLQESGPGLVKPSETLSLTCTVSGGSVSSGSYF |
| | WSWIRQPPGKGLEWIGYIYYSGSTNYNPSLKSRVT |
| | ISVDTSKNQFSLKLRSVTAADTAVYYCARAPNDFW |
| | SGYPYYFDYWGQGTLVTVSS |
| 868 | QVQLVQSGAEVKKPGASVKVSCKASGYTFTSYGIS |
| | WVRQAPGQGLEWMGWISAYNGNTNYAQKLQGRVTM |
| | TTDTSTSTAYMELRSLRSDDTAVYYCTRDGSTAAI |
| | FGNIDYWGQGTLVTVSS |
| 869 | QVQLVQSGAEVKKPGASVKVSCKASGYTFTGYYMH |
| | WVRQAPGQGLEWMGWINPNSGGTNYAQKFQGRVTM |
| | TRDTSISTAYMELSRLRSDDTAVYYCARGVVRNDY |
| | GDPGFDYWGQGTLVTVSS |
| 870 | QVQLVQSGAEVKKPGASVKVSCKVSGYTLTELSMH |
| | WVRQAPGKGLEWMGGFDPEDGETIYAQKFQGRVTM |
| | TEDTSTDTAYMELSSLRSEDTAVYYCATAPAYCSG |
| | GSCPENNWFDPWGQGTLVTVSS |
| 871 | QVLLVQSGAEVKKPGASVKVSCKASGYRFTSYGIH |
| | WVRQAPGQSLEWMGCINTDNEKTEYSQKFQGRVTI |
| | TRDTSASTAYMELSTLRFEDTAVYYCAILWFGEFY |
| | FYDLFYNAVDVWGQGTTVTVSS |
| 872 | QVLLVQSEAEVKKPGASVKVSCKASGYRFTSYGIH |
| | WVRQAPGQGLEWMGSINTDNGKTEYSQKFQGRVTI |
| | TRDTSAGTAYMELSTLRSEDTAVYYCAILWFGEFY |
| | FYDLFYNAVDVWGQGTTVTVSS |
| 873 | QVQLVQSGAEVKKPGASVKVSCKASGYTFTSYAMH |
| | WVRQAPGQRLEWMGWINAGNGNTRYSQKFQGRVTI |
| | TRDTSASTAYMELSSLRSEDTAVYYCASRREQWLG |
| | DLGYYYYGMDVWGQGTTVTVSS |
| 874 | QVQLVQSGAEVKKPGASVKVSCKASGYTFTSYYMH |
| | WVRQAPEQGLEWMGIINPSGGSTSYAQKFQGRVTM |
| | TRDTSTSTVYMELSSLRSEDTAVYYCARGGAHSED |
| | YWGQGTLVTVSS |
| 875 | QVQMVQSGAEVKKPGASVKVSCKASGYTFTNYYVH |
| | WVRQAPGQGLEWMGRINPSDGSTSYTQKFQGRVTM |
| | TRDTSTSTVYMQLSSLRSEDTALYYCARHQDPLDI |
| | VATVDWGGLDYWGQATLVTVSS |
| 876 | QVQLVQSGGELRKPGSSVKVSCKASGGTFSSYTIS |
| | WVRQAPGQGLEWMGRIIPMLNKTYYAQKFQGRVTF |
| | AADESTNTVYMELSSLRSEDTAMYYCARVASLIGD |
| | DYWGQGSLVTVSS |
| 877 | QVQLVQSGAEVKKPGSAVKVSCKASGGTFNSYAFN |
| | WVRQAPGQGLEWMGGIIPIFGPPNYAQNFQGRVTI |
| | TADESTSTAYMELSSLTSEDTAVYYCATTGTDNYY |
| | YYMDVWGKGTTVTVSS |
| 878 | QVQLVQSGAEVKKPGASVKVSCKASGYTFTSSDIN |
| | WVRQATGQGLEWMGWMNPNTGTTGYAQKFQDRVTM |
| | TRDTSINTAYMELSSLRSEDTAVYYCARKNCSGGI |
| | CYFHDYWGQGTRVTVSS |
| 879 | QITLKESGPTLVKPTQTLTLTCTFSEFSLDARGVG |
| | VGWIRQPPGRALEWLALIYWNDYKRYSPSLQSRLT |
| | ITKDTSKNQVVLTMTNMDPVDTATYYCAHKPSGWS |
| | LRFDSWGQGTLVTVSS |
| 880 | EVQLLESGGGLVQPGGSLRLSCAASGFTFISYATS |
| | WVRQAPGKGLEWVSAISGSGGSTYYADSVKGRFTI |
| | SRDNSKNTLYLQMNSLRAEDTAVYYCAKGQTIQLW |
| | LFGALWGQGTLVTVSS |
| 881 | EVQLLESGGGLVQPGGSLRLSCAASGFTFSSYAMS |
| | WVRQAPGKGLEWVSAISGSGGTTYYADSVKGRFTI |
| | SRDNSKNTLYLQMDSLRGDDTAVYSCALTVSSWYP |
| | GIFENWGQGTLVTVSS |
| 882 | QVQLVESGGGVVQPGRSLRLSCAASGFTFSSYGMH |
| | WVRQAPGKGLEWVAVISYDGSNKYYADSVKGRFTI |
| | SRDNSKNTLYLQMNSLRAEDTAVYYCAKAFSGSYW |
| | DAFDIWGQGTMVTVSs |
| 883 | QVQLVESGGGVVQPGRSLRLSCAASGFTFSSHGMH |
| | WVRQAPGKGLEWVAVISYDGINKYYADSVKGRFTI |
| | SRDNSKNTLFLQLNSLRAEDTAVYYCAKAASGARG |
| | YYGMDVWGQGTTVTVSS |
| 884 | QVQLVESGGGVVQPGRSLRLSCAASGFTFSSYAMH |
| | WVRQAPGKGLEWVAVISYDGSNKYYADSVKGRFTI |
| | SRDNSKNTLYLQMNSLRAEDTAVYYCARSSSGHYV |
| | SDLGYWGQGTLVTVSS |
| 885 | QVQLVESGGGVVQPGRSLRLSCAASGFTFSSYAMH |
| | WVRQAPGKGLEWVAVISYDGSNKYYADSVKGRFTI |
| | SRDNSKNTLYLQMNSLRAEDTAVYYCARALNGYRY |
| | NDYWGQGTLVTVSS |
| 886 | QVQLVESGGGVVQPGRSLRLSCAASGFTFSTYGMH |
| | WVRQAPGKGLEWVAVMWFDGVDKYYADSVKGRFTI |
| | SRDNSKNTLYLQMNSLRDEDTAVYYCAREEGGGSS |
| | THFDCWGQGTLVTVSS |
| 887 | QVQLVESGGGVVQPGRSLRLSCAASGFTFSTFAMH |
| | WVRQAPGKGLEWVAIISYDEINKYYADSVKGRFTI |
| | SRDNSKNMLYLQMNSLRAEDTAVYYCARTREGSYY |
| | YGMDVWGQGTTVTVSS |
| 888 | EVKLVESGGHLVQPGRSLRLSCTASGFIFGDYAMG |
| | WVRQAPGKGLEWVSFIRGRLVGATVEYAASVKGRF |
| | TMSRDDSERVAYLQMNSLKIEDTGVYYCVRGGLQF |
| | VVAVGPYGVDVWGQGTTVTVSS |
| 889 | EVKLVESGGHLVQPGGSLRLSCTASGFIFGDYAMG |
| | WVRQAPGKGLEWVSFIRGRLVGATVEYAASVKGRF |
| | TMSRDDSERVAYLQMSSLKIDDTGVYYCVRGGLQF |
| | VVAVGPYGVDVWGQGTTVTVSS |
| 890 | EVQLVESGGGLVQPGGSLRLSCAASGFTFSSYWMS |
| | WVRQAPGKGLEWVANIKQDGSEKYYVDSVKGRFTI |
| | SRDNAKNSLYLQMNSLRVEDTAVYYCARDIGGGAP |
| | DYWGQGTLVTVSS |
| 891 | QVLLQESGPGLVRPSQTLSLTCSVSGASISSGDYY |
| | WTWVRQTPGKGLEWLGFIYYSGSTYYNPSLQRRVL |
| | ISMDTAMNQFSLRLTSVTAADTAVYYCAIKPSIPG |
| | YFDPWGQGTLVTVSS |
| 892 | QVQLQQWGAGLLKPSETLSLTCALNGGVLSDYYWS |
| | WIRQPPGQGLEWIGAIHRSGSTSYTPSLKSRVTMS |
| | VDTSKNQFSLRLSSVTAADTAVYYCARVGGWQRSP |
| | RPNWGQGTRVTVSS |
| 893 | QVQLQQWGAGLLKPSETLSLTCALNGGVLSDYYWS |
| | WIRQPPGQGLEWIGAIHRSGSTSYTPSLKGRVTMS |
| | VDTSKNQFSLRLSSVTAADTAVYYCARVGGWQRSP |
| | RPNWGQGTRVTVSS |
| 894 | QVQLQQWGAGLLKPSETLSLTCAVYGGSFSDYYWN |
| | WIRRPPGKGLEWIGEITHSGSTNYNPSLKSRVTIS |
| | VDTSKNQFSLKLSSVTAADTAVYYCARGQGYGRVL |
| | LWFGEWGQGTLVTVSS |
| 895 | QVQLQQWGAGLLKPSETLSLTCAVYGGSFSDYFWY |
| | WIRQPPGKGLEWIGEINHSGSTNYNPSLKSRVSIS |
| | VDTSKNQFSLKLSSVTAADTAVYYCARGQGYGRVL |
| | LWFGEWGQGTLVTVSS |
| 896 | QVQLQESGPGLVKPSGTLSLTCDVSGDSISSNNWW |
| | TWVRQPPGKGLEWIGDIYHSGTTNYNPSLKSRLTM |
| | SVDKSKNHFSLKLTSVTAADTAVYYCARPSSGSRF |
| | DYWGQGTLVTVSS |
| 897 | QVQLQESGPGLVKPSETLSLTCTVSGGSISSYYWS |
| | WIRQPAGKGLEWIGHIYTSGSTNYNPSLKSRVTMS |
| | VDTSKNQFSLKLSSVTAADTAVYYCARGFDYWGQG |
| | TLVTVSS |
| 898 | QVQLQESGPGLVKPSETLSLTCTVSGDSISSYYWS |
| | WIRQSPGKGLEWIGYIYHSGSADYNPSLKSRVSMS |
| | LDASKNQFSLKMSSVTAADTALYYCAKARGVVLFD |
| | YWGQGTLVTVSS |
| 899 | QVQLRESGPGLVKPSETLSLTCTVSGGSISGYYWS |
| | WIRQPPGKGLEWIGYLHYSGRSNSSPSLNSRVSIS |
| | VDTSQNRFSLKVTSLTAADTAVYYCARHSYGSGTY |
| | LDPFDYWGQGTLVTVSS |
| 900 | QVQLQESGPGLVKPSQTLSLTCTVSGGSISSGSYY |
| | WSWIRQPAGKGLEWIGRIYTSGSTNYNPSLKSRVT |
| | ISVDTSKNQFSLKLSSVTAADTAVYYCARQPHLAY |
| | YYDSSGYNDAFDIWGQGTMVTVSS |
| 901 | QVQLQESGPGLVKPSQTLSLICTVSDDSISSGSYY |
| | WSWIRQPAGKGLEWIGRIYAGESTNYNPSLKSRVI |
| | ISVDTSKKQFSLRLSSVTAADTAVYYCARGAVVTP |
| | FGLDSWGQGTLVTVSS |
| 902 | EVQLVQSGAEVKKPGESLKISCKGSGYSFTSYWIG |
| | WVRQMPGKGLEWMGIIYPGDSDTRYSPSFQGQVTI |
| | SADKSISTAYLQWSSLKASDTAMYYCASEDYYDSS |
| | GYYWYWGQGTLVTVSS |
| 903 | EVQLVQSGAEVKKPGESLKISCKGSGYSFTSYWIG |
| | WVRQMPGKGLEWMGIIYPGDSDTRYSPSFQGQVTI |
| | SADKSISTAYLQWGSLKASDTAMYYCARLSAIAVV |
| | GYYYYAMDVWGQGTTVTVSs |
| 904 | QVQLVQSGSELKKPGASVKVSCKASGYTFTSYAMN |
| | WVRQAPGQGLEWMGWINTNTGNPTYAQGFTGRFVF |
| | SLDTSVSTAYLQISSLKAEDTAVYYCARDFIAASP |
| | FYYYYYMDVWGKGTTVTVSS |
| 905 | EVQLVQSGAEVKKPGESLKIFCKGSGYTFSFYWIG |
| | WVRQTPGKGLEWMGIIYPGDFDTRYSPSFQGQVTI |
| | SADKSINTAYLQWSSLKASDTAMYYCATSPGGYGV |
| | RRTVLEDFRHWGQGTLVTVAS |
| 906 | QLQLQESGPGLVKPSETLSLTCTVSGGAFSSGRHY |
| | WGWIRQPPGKGLEWIGSIYSGVITHYNAPLKSRVT |
| | IAVDTSKNQFSLKLSSVTAADTAVYYCWTMEYDDY |
| | SFVYDYWGQGTLVTVSS |
| 907 | QVHLQQWGAGLLKPSQTLSLTCAVYGGSFSSYYWS |
| | WIRQTPGKGLEWIGEVTHSGSTNYKPSLKSRVTMS |
| | VDTSRNQFSLNLTSVTAADTAVYYCARGGKQQLVR |
| | NYYLDSWGQGTLVTVSS |
| 908 | QVQLVQSGAEVKKPGASVKVSCKVSGYTLTELSMD |
| | WVRQAPGKGLEWMGGFDPEDGETIDAQKFQGRVTM |
| | TEDTSTDTAYMELSSLRSEDTAVYYCATGFGGVIV |
| | RGFDYWGQGTLVTVSS |
| 909 | QVQLVESGGGLVKPGGSLRLSCAASGFTFSDYYMS |
| | WIRQAPGKGLEWVSYISSSGSTIYYADSVKGRFTI |
| | SRDNAKNSLYLQMNSLRAEDTAVYYCARVYGDYSY |
| | YMDVWGKGTTVTVSS |
| 910 | EVQLVESGGGLIQPGGSLRLSCAASGITVSSNYMS |
| | WVRQAPGKGLEWVSVIYSGGSTDYADSVKGRFTIS |
| | RDKSKNTLYLQMNSLRAEDTAVYYCARDLGEAGGM |
| | DVWGQGTTVTVSS |
| 911 | EVQLVESGGGLVQPGGSLRLSCAASGFTFSRFWMT |
| | WVRQAPGKGLEWVANIKEDGSVMFYVDSVKGRFSI |
| | SRDNSKNSLYLEMNSLRAEDTAVYFCVREIESGVD |
| | FWSGHYYWGQGTLVTVSS |
| 912 | EVQLVESGGGLVQPGGSQRLSCVASGFTFSNYWMS |
| | WVRQAPGKGLHWVANIKSDGSETYYVDSLRGRFTI |
| | SRDNAKNSLYLQLTSLTVEDTAVYYCARDSAYYDT |
| | IGYYSGDYWGRGTLVTVSS |
| 913 | QVQLVESGGGAVQPGRSLRLSCEASAFSFHLHGMH |
| | WVRQAPGKGLEWVALIWFDGSKKFYADAVKGRFTI |
| | SRDNSKNTLYLQMNSLRVEDTAIYYCGRSFRGSCF |
| | DYLGQGTLVTVSS |
| 914 | EVQLLESGGGLVQPGGSLRLSCAASGFTFSSYAMS |
| | WVRQAPGKGLEWVSAISSSGGGTYYADSVKGRFTI |
| | SRDNSKNTLYVQMNSLRAEDTAVYYCALGTGSYYG |
| | VNYWGQGTLVTVSS |
| 915 | EVQLVESGGGLVQPGRSLRLSCAAFGFIFDDYGMH |
| | WVRQVPGKGLEWVSGITWNSGSIGYADSVKGRFTI |
| | SRDNAKNSLYLQMNSLRAEDTALYFCAKDMGGRYS |
| | SGLYYYYYGMDVWGQGTTVTVSS |
| 916 | EVQLVESGGGLVQPGGSLRLSCAASGFTVSSNYMS |
| | WVRQAPGKGLEWVSVIYSGGSTYYADSVKGRFTIS |
| | RHNSKNTLYLQMNSLRAEDTAVYYCARELRGYFDY |
| | WGQGTLVTVSS |
| 917 | QMRLQESGPGLVKPSETLSLTCTVSGGSIGSSSYF |
| | WGWIRQPPGKGLEWIGNIYYGGSTYYKPSLKSRVT |
| | ISLDTSKNQLTLRLSSVTAADTAVYYCARDPNDFW |
| | SGFPRGAFDIWGQGTMVTVSS |
| 918 | QLQLQESGPGLVKPSETLSLTCTVSGGSISSSSYY |
| | WGWIRQPPGKGLEWIGSIYYSGSTYYNPSLKSRVT |
| | ISVDTSKNQFSLKLSSVTAADTAVYYCASHARYEE |
| | ETFDYWGQGTLVTVSS |
| 919 | EVQLVESGGGLAQPGGSLRLSCAASGFTFSSYDMH |
| | WVRQAAGKGLEWVSTIGTAGDTYYPGSVKGRFTIS |
| | RENDKNSLYLQMNSLRAGDTAVYYCVRDSYTSAWT |
| | PAGYFDLWGRGTLVTVSS |
| 920 | QVQLVESGGGVVQPGRSLRLSCAASGFTFSRSAMH |
| | WVRQGPGKGLEWVAMMSYDGSDIQYADSVKGRFTI |
| | SRGNSKNTLFLQMNSLRLADTAMYYCAKDHYGSID |
| | YWGQGTLVTVSS |
| 921 | QVQLVESGGGVVQPGRSLRLSCVASGFTFSSQSMH |
| | WVRQAPGKGLEWVSIISYDGNNKQYADSVKGRFTI |
| | SRDNSKSTLFLQINSLRPQDTAVYYCARPYTSRWF |
| | WSNWGQGTLVTVSS |
| 922 | EVQLVESGGGLVQPGRSLRLSCAASGFTFEEYSIH |
| | WVRQAPGKGLEWVSGVSWNSGTIAYADSVRGRFTI |
| | SRDNAKNSLYLQMSRLRADDTALYYCALLPPNAYD |
| | YGDGLLDHWGQGTLVTVSS |
| 923 | EVQVVQSGAEVKKPGESLKISCKGSGYTFGRYWIA |
| | WVRQMPGKGLEWMGIINPADSDTRYSPTFQGQVTI |
| | SVDQAISTAYLQWSSLKASDTAMYHCARHRAAGGN |
| | YYYGMDVWGQGTTVTVSS |
| 924 | QVQLVQSGAEVKKPGASVKVSCKASGYTFSTYYMH |
| | WVRQAPGQGLEWMGIINPSGDSTRYAQKFQGRVTM |
| | TRDTSTSTVYMEVSSLRFEDTAVYYCARERVGPAA |
| | GYMDVWGKGTTVTVSS |
| 925 | QVQLVQSGAEVKKPGSSVKVSCKASGGTFSSYAIS |
| | WVRQAPGQGLEWMGRIIPIFGTANYAQKFQGRVTI |
| | TADESTSTAYMELSSLRSEDTAVYYCARAAYYYDS |
| | SGYGWFDPWGQGTLVTVSS |
| 926 | QVQLVQSGAEVKNPGSSVKVSCKTSGATFTTYAIN |
| | WVRQAPGQGLEWIGGIFPIFTAAVYAQKFQGRVTI |
| | TADESTTTAYLELSSLRSEDTAVYYCARGDYTEYS |
| | YYYMDVWGKGTTVTVSS |
| 927 | EVQLLESGGGLVQPGGSLRLSCAASGFTLSSYAMS |
| | WVRQAPGRGLEWVSAVSGSGGSTYYADSVKGRFTI |
| | SRDNSKNMLYLQMNSLRAEDTAIYYCALPTGASSS |
| | YSGPNYWGQGTLVTVSS |
| 928 | QVQLVESGGGVVQPGRSLRLSCVASGFTFSNYDMH |
| | WVRQAPGKGLEWVTVISSDGNNRRYADSVKGRFTI |
| | SRDNSKNMLYLQMNSLKAEDTAVYYCARDEVIAVA |
| | TGEGMDVWGQGTTVTVSP |
| 929 | EVQLVESGGGLVQPGRSLRLSCAASGFTFDDYAMH |
| | WVRQAPGKGLEWVSGISWNSGSIGYADSVKGRFTI |
| | SRDNAKNSLYLQMNSLRAEDTALYYCAKDMGYDIL |
| | TGSGLGDYWGQGTLVTVSS |
| 930 | EVQLVESGGGLVQPGRSLRLSCAASGFTFDDYAMH |
| | WVRQAPGKGLEWVSGISWNSGTIGYEDSVKGRFII |
| | SRDNAKNSLYLQMNSLRAEDTALYYCAKEPLFGET |
| | YGMDVWGQGTTVTVSS |
| 931 | EAQLVESGGGLVQPGRSLTVSCAVSGFTFDDYAMH |
| | WVRQAPGKGLEWVSSISWNSEKIAYADSVKGRFTV |
| | SRDNAKNSLYLQMTSLRPEDTALYYCARDKGSGSY |
| | YSGAYYYYMDVWGKGTTVTVSS |
| 932 | EVQLVESGGGLVPPGGSLRLSCAASGFTFSSYTIN |
| | WVRQAPGKGLEWVSYINSGSSIIYYADSVKGRFTI |
| | SRDNAKNSLYLQMNSLRAEDTAVYYCATFNSGNDN |
| | AYEYWGQGTLVTVSS |
| 933 | EVRLVESGGGWVQPGGSLRLSCEASTFIFSNSEMN |
| | WVRQAPGKGLEWVSYISSSDNSVHYADSVKGRFTI |
| | SKDSAKKTLYLQMNSLRAEDTGVYYCAREYPDFWS |
| | GHYYYYMDVWGKGTTVTVSS |
| 934 | EVQLVESGGGLVQPGGSLRLSCAASGFTVSSNYMS |
| | WVRQAPGKGLEWVSVIYSGGSTYYADSVKGRFTIS |
| | RDNSKNTLYLQMNSLRAEDTAVYYCARLPYGMDVW |
| | GQGTTVTVSS |
| 935 | QVKLQQWGAGLVKPSETLSRTCAVYGGSFSGYFWS |
| | WIRQSPGKGLEWIGEINHSGKTNYSPSLKSRVSIS |
| | VDTSKNQFSLKLTSVTAADTAVYYCARGLYDKSGY |
| | RSDGFDSWGQGAVVTVYS |
| 936 | QVQLQQWGAGLLKPSETLSRTCAVYGGSFSGYYWT |
| | WIRQPPGKGLEWIGEINHSGSTNYNPSLKSRITMS |
| | VDTSKNQFSLELRSVSAADTAVYYCARGFEGYCSG |
| | GRCYSYFDYWGQGTLVTVSS |
| 937 | QVQLQESGPGLVKPSETLSLTCTVSGGSLSSYYWN |
| | WIRQPPGKGLEWIGYMYNSGSTNYNPSLKSRVTIS |
| | VDTSKNQFSLKLSSVTAADTAVYYCARVKNWDYGL |
| | YWGQGTLVIVSS |
| 938 | QVQLQESGPGLVKPSETLSLTCTVSGGSISTFYWN |
| | WVRQPPGKGLEWIGFIYYSGRTNYNPSLKSRVTIS |
| | VDTSKNQFSLKVSSVTAADTAVYYCARDGQSDWHF |
| | DLWGRGTLVTVSS |
| 939 | QVQLQESGPGLVKPSETLSLTCTVSGGSVSSYFWS |
| | WLRQPPGKGLEWIAYIFYTGTSNYNPSLKSRVTIS |
| | LDTSKNQMSLNLSSVTTADTAVYYCARVYGDYLDH |
| | WGQGTVVTVSS |
| 940 | QITLKESGPTLVKPTQTLTLTCTFSGFSFNTPGVG |
| | VGWIRQPPGKAPECLALIYWDDEKLYNPSLKTRLT |
| | ITKDPSKNQVVLTMTTMDPVDTATYYCAHRSFLYN |
| | IFNGYSYAPFDYWGQGSMVTVSS |
| 941 | QVQLVESGGGVVQPGRSLRLSCAASGFSFSNHGMH |
| | WVRQAPGKGLEWVAVIWYDGDNRFYADSVRGRFTI |
| | SRDNSKNTLFLQMDSLRAEDTGIYYCAKDLFSGDR |
| | DFWGQGTLVTVSS |
| 942 | QVQLVESGGGVVQPGRSLRLSCVASGFTFSNSAMH |
| | WVRQAPGMGLEWVAVIYYDGSNEYYADSVKGRFTI |
| | SRDNSKNTLYLQMNSLRADDTAVYYCAKDSGAVLL |
| | WFGADFWGQGTLVTVSS |
| 943 | DVQLVESGGSLVQPGGSLRLSCAASEFTFSSYEMN |
| | WVRQAPGKGLEWVSYIDSSSTTIYYADSVKGRFTI |
| | SRDNAKNSLYLQMNSLRAEDTAVYYCAREGAYDIW |
| | RGSYMRAYDHWGQGTLVTVSS |
| 944 | QVQLVQSGSELKKPGASVKVSCKASGYTFTNFAIN |
| | WVRQAPGQGLEWMGWINTKTGIPTYAQGFTGRFVF |
| | SLDTSVSTAYLQISGLKAEDTAVYYCARYIEMFDP |
| | WGQGTLVTVSS |
| 945 | QVQLVQSGAEVKKPGASVKVSCKASGYTFTSYGIS |
| | WVRQAPGQGLEWMGWISAYNGNTNYAQKLQGRVTM |
| | TTDTSTSTAYMELRSLRSDDTAVYYCARQAYGDYG |
| | WDYYYGMDVWGQGTTVTVSS |
| 946 | QVQLAEAGGGVVQPGTSLRLSCVVSGFSFSRYGMH |
| | WVRQAPGKGLEWVAVISHDDSQKYYGDSVKGRFTI |
| | SRDNSKDTLYLEMTSLRLEDTAVYYCLKDWDWEYE |
| | DSRPTLRGSVYWGQGTLVIVSA |
| 947 | QVQLVESGGGAVQPGRSLRLSCVTSGFNFNSYTMH |
| | WIRQAPGKGLEWVAVISYEGSKKYYADSLKGRFTI |
| | SKDNSKNTVYLEMNSLTTEDTAVYYCARGSVFWFG |
| | EGKNWFDPWGQGTLVTVSS |
| 948 | QVQLVESGGGAVQPGRSLRLSCVTSGFNFNSYTMH |
| | WIRQAPGKGLEWVAVISYEGSKKYYADSLKGRFTI |
| | SKDNSKNTVYLEMNSLTTEDTAVYYCARGSVFWFG |
| | EGKNWFDPWGQGTLVIVSS |
| 949 | EVQLVESGGGLVQPGGSLRLSCAASGFTFSSYEMN |
| | WVRQAPGKGLEWVSYISSSGSTIYYADSVKGRFTI |
| | SRDNAKNSLYLQMNSLRAEDTAVYYCAREDSSGWS |
| | RGDYWGQGTLVTVSS |
| 950 | QVQLVQSGSELKKPGASVKVSCKASGYIFTSYGMN |
| | WVRQAPGQGLEWMGWINTNTGSPMYAQGFTGRFVF |
| | SLDTSVSTAYLQISSLKAEDTAVYYCARRFVVREV |
| | EYNWFDPWGQGTLVTVSS |
| 951 | QAQLVQSGSEVRKPGASVKVSCKASGYSFNDYGIT |
| | WVRQAPGQGLEWMGWISAYNGETNYAQKFQDTVTM |
| | TTDTSTNTAYLELRSLRFADTALYYCARDGYCNSM |
| | RCYRYYHGMDVWGQGTTVTVSS |
| 952 | QVQLVQSGAEVKKPGASVKVSCKVSGYTLTELSMH |
| | WVRQAPGKGLEWMGGFDPEDGETIYAQKFQGRVTM |
| | TEDTSTDTAYMELSSLRSEDTAVYYCATGPTAKPN |
| | KQWGYWFDPWGQGTLVTVSS |
| 953 | QVQLVQSGAEVKKPGASVKVSCKASGNTFSTYYIH |
| | WVRQAPGQGLEWMGIISPSGDDANYTQKFQDRVTM |
| | TRDTPTNTVYLELSSLRSEDTAVYYCASPVSVEQD |
| | FDIWGQGTMVTVSA |
| 954 | EVQLVESGGGSVKPGGSLRLSCAASGFTFSDVWMS |
| | WVRQAPGKGLEWVGRIRSKSDGGTTDYAAPMKERF |
| | SISRDDAKNTMYLQMNSLKTEDTGVYYCTTPVGDF |
| | WGQGTMVTVSS |
| 955 | EVQLMESGGGLVKPGGSLRLSCAGSGLTFDNAWMS |
| | WVRQAPGKGLEWVGRVKSKTDGGTTDYAAPVKGRF |
| | TISRDDSKNTLFLQMNSLKTEDTAVYYCSTSHPPF |
| | FDYWGQGTLVTVSS |
| 956 | QVQLVESGGGVVQPGRSLRLSCAASRFTFSSYAMH |
| | WVRQAPGKGLEWVALISYDGSNKYYADSVKGRFTI |
| | SRDNSKNTLYLQMDSLRPEDTAVYYCARGLWQLVS |
| | PVFDYWGQGTLVTVSS |
| 957 | EVQLVESGGVVVQPGGSLRLSCAASGFTFDDYAMH |
| | WVRQAPGKGLEWVSLISWDGGSTYYADSVEGRFTI |
| | SRDNSKNSLYLQMNSLRAEDSALYYCAKVTNRGVR |
| | GLYFDYWGQGTLVTVSS |
| 958 | QVQLVQSGAEVKKPGASVKVSCKASGNTFTTYYIH |
| | WVRQAPGQGLEWMGIISPSGDDANYTQKFQDRVTM |
| | TRDTPTNTVYLELSSLRSEDTAVYYCASPVSVEQD |
| | FDIWGQGTMVTVSA |
| 959 | QVQLVQSGAEVKKPGSSVNVSCKASGGTFNSYTLS |
| | WVRQAPGQGLEWMGRIVPMLGITNYAQKFQDRVTI |
| | TADESTATAYMDLSSLTSEDTAVYFCAINTLLVTA |
| | WGQGTLVTVSS |
| 960 | QITLKESGPTLVKPTQTVTLTCTFSGFSLNTPGAG |
| | VGWIRQPPGQALECLALIYWDDDKRYSPSLRSRLS |
| | IAKDTAKNQVVLTVTNLDPVDTATYYCVHRSFLYD |
| | IFSGYSYAPFDYWGQGMLVTVSS |
| 961 | QITLKESGPTLVKPTQTLTLTCTFSGFSFNTPGVG |
| | VGWIRQPPGKAPECLGLIYWDDEKRYSPSLKSRLT |
| | ITKDPSKNQVVLTMTTMDPVDTATYYCAHRSFLYN |
| | IFDGYSYAPFDYWGQGSMVTVSS |
| 962 | QVQLVESGGGLVKPGGSLRLSCAASGFTFTFSDYY |
| | MNWIRQAPGGGLEYIAYISSGGDAIYYADSVKGRF |
| | IISRDNSESSVSLQMTSLRADDTAVYYCAGGADCR |
| | RTSCHYLVSNREEYMGVWGKGTTVTVSS |
| 963 | EVQLVESGGGLVKPGGSLRLSCAASGFTFSDYYMN |
| | WVRQAPGKGLEWVSSMSSDSDYIFYADSVKGRFTI |
| | SRDNAKNSLYLQMNSLRAEDTAVYYCARGLVLSGT |
| | RYSYFYGMDVWGQGTTVTVSS |
| 964 | QVHLAEAGGGVVQPGRSLRLSCVVSGFSFSRYGMH |
| | WVRQAPGKGLEWVAVISHDESQKYYGESVKGRFTI |
| | SRDNSKDTVYLQMDSLRVEDTAVYYCVKDWDWEYE |
| | DNRPTLRGSVYWGQGTLVIVSA |
| 965 | QVQLAEAGGGVVPPGRSLRLSCVVSGLSFSRYGMH |
| | WVRQAPGKGLEWVAVISHDESQKYYGESVKGRFTI |
| | SRDNSKDTLYLQMDGLRVEDTAMYYCVKDWDWEYE |
| | ESRPTLRGSVYWGQGALVIVSA |
| 966 | QVQLVESGGGVVQPGRSLRLSCATSGFSFNNFGMH |
| | WVRQAPGKGLEWLAVISYEGSKKYYADSLKGRFTI |
| | SRDGSKDTLYLQLSSLGVEDTAVYHCAKGGPIFWL |
| | GEGKNWFDAWGPGTPVIVSS |
| 967 | QVQLVESGGGVVQPGRSLRLSCAASGFTLSSYAMH |
| | WVRQAPGKGLEWVAVISYDGSNKYYRDSVKGRFTI |
| | SRDNSKNTLYLQINSLRVDDTAVYYCARDKGGILM |
| | LRGADFWGQGTLATVSS |
| 968 | EVQLVESGGGLVQPGGSLRLSCAASGFTFSSYEMN |
| | WVRQAPGKGLEWVSYITSSGNTILYADSVKGRFTI |
| | SRDNAKNSLYLRMNSLRAEDTALYYCARTLIAAAG |
| | SAFDIWGQGTMVTVSS |
| 969 | EVQLVESGGGLGLPGGSLRLSCAASGFTFSSYAMN |
| | WVRQAPGKGLEWISYISSSSGTIYYADSVKGRFTI |
| | SRDNAKNSLFLQMNSLRDEDTAVYYCARGPTSITM |
| | IVVVDDAFDIWGQGTMVTVSS |
| 970 | QVQLQESGPGLVKPSETLSLTCSVSGGSISPYSWS |
| | WIRQPPGKGLEWIGYIYYTGKTNYNSSLKTRVTIS |
| | LDTSKNQFSLRLTSVTTADTAIYYCARVMNSSWYT |
| | RYYYNYMDVWGKGTSVTVSS |
| 971 | QLQLQESGPRLVKPSATLSLTCTVSGDSIRSSSFY |
| | WGWIRQPPEKGLEWLGSVYNSGTAYYNPSLKSRVS |
| | VSVDTSKNQFSLKVNSVTAADTAVYYCARRGGGCS |
| | EGVCYNFDRWGQGTLVTVSS |
| 972 | QVQLVQSGSELKKPGASVKISCKAFGYSFTTYAMN |
| | WVRQAPGRGLEWMGWIDTNTGKPTYARGFTGRFVF |
| | SLDTSVRTSYMQINTLKAEDTAVYYCARGDPRDYW |
| | GQGTLVTVSS |
| 973 | QVQLVQSGAEVKKPGSSVKVSCKASGGTFSSYAIS |
| | WVRQAPGQGLEWMGRIIPIFGTANYAQKFQGRVTI |
| | TADESTSTAYMELSSLRSEDTAVYYCARGSYYYDS |
| | SGYYLDYWGQGTLVTVSS |
| 974 | QVQLVQSGAEVKKPGSSVKVSCKASGGTFSSYAIS |
| | WVRQAPGQGLEWMGRIIPIFGTANYAQKFQGRVTI |
| | TADESTSTAYMELSSLRSEDTAVYYCARAAYYYDS |
| | SGYGWFDPWGQGTLVTVSS |
| 975 | EVQLVESGGGLVKPGGSLRLSCAASGFTFSHAWMC |
| | WVRQAPGKGLEWVGRIKSNTDGGTTDYAAPVKGRF |
| | TISRHDSKNTLYLQLNSLKTEDTAVYYCTTDLGAT |
| | GIYYYYYMDVWGKGTTVTVSS |
| 976 | EVQLVESGGGLVQPGGSLRLSCAASGFTFSSYEMN |
| | WVRQAPGKGLEWVSYISSSGSTIYYADSVKGRFTI |
| | SRDNAKNSLYLQMNSLRAEDTAVYYCARFPRDYYD |
| | SSGYLIQEGNFDYWGQGTLVTVSS |
| 977 | EVQLVESGGGLIQPGGSLRLSCAASGFTVSSNYMS |
| | WVRQAPGKGLEWVSVIYSGGSTYYADSVKGRFTIS |
| | RDNSKNTLYLQMNSLRAEDTAVYYCARVTRAGAAG |
| | DGGAFDIWGQGTMVTVSS |
| 978 | QVQLQESGPGLVKPSETLSLTCTVSGGSISSYYWS |
| | WIRQPPGKGLEWIGYIYYSGSTKYNPSLKSRVTIS |
| | VDTSKNQFSLKLSSVTAADTAVYYCARSVVPVAGT |
| | DYWGQGTLVTVSS |
| 979 | QVQLVQSGAEVKKPGASVKVSCKASGYTFTTYGIS |
| | WVRQAPGQGLEWMGWISAYNGNTNYAQKLQGRVTM |
| | TTDTSTSTAYMELRSLRSDDTAVYYCARDQHPGYP |
| | ALVYYYYYMDVWGKGTTVTVSS |
| 980 | QVQLVQSGAEVKKPGASVKVSCKASGYTFTNYGIT |
| | WVRQAPGQGLEWMGWISTYSGNTNYAQKLQGRVTM |
| | TTDTSTSTAYMELRSLRSDDTAVYYCARDNIQTFD |
| | YWGQGTLVTVSS |
| 981 | QVQLVQSGAEVKKPGASVKVSCKVSGYTLTELSMH |
| | WVRQAPGKGLEWMGGFDPEDGETIYAQKFQGRVTM |
| | TEDTSTDTAYMELSSLRSEDTAVYYCATSSPVAGY |
| | NSWFDPWGQGTLVTVSS |
| 982 | QVQLVQSGAEVKKPGASVKVSCKVSGYTLTELSMH |
| | WVRQAPGKGLEWMGGFDPEDGETIYAQKFQGRVTM |
| | TEDTSTDTAYMELSSLRSEDTAVYYCATGPAVIPL |
| | RWFDPWGQGTLVTVSS |
| 983 | QVQLVQSGAEVKKPGASVKVSCKVSGYTLTELSMH |
| | WVRQAPGKGLEWMGGFDPEDGETIYAQKFQGRVTM |
| | TEDTSTDTAYMELSSLRSEDTAVYYCATAPAAAGP |
| | TDWFDPWGQGTLVTVSS |
| 984 | QVQLVQSGAEVKKPGASVKVSCKVSGYTLTELSMH |
| | WVRQAPGKGLEWMGGFDPEDGETIYAQKFQGRVTM |
| | TEDTSTDTAYMELSSLRSEDTAVYYCAISPSVHSL |
| | WWFDPWGQGTLVTVSS |
| 985 | QVQLVQSGAEVKKPGASVKVSCKASGYTFTSYAMH |
| | WVRQAPGQRLEWMGWINAGNGNTKYSQKFQGRVTI |
| | TRDTSASTSYMELSSLRSGDTAVYYCARDEIHYDI |
| | LTGYYNRFWFHPWGQGTLVTVSS |
| 986 | QVQLVQSGAEVKKPGSSVKVSCKASGGTFSSYAIS |
| | WVRQAPGQGLEWMGGIIPIFGTANYAQKFQGRVTI |
| | TADESTSTAYMELSSLRSEDTAVYYCARDAETGYY |
| | DSSGYPINWFDPWGQGTLVTVSS |
| 987 | QVTLKESGPVLVKPTETLTLTCTVSGFSLSNARMG |
| | VSWIRQPPGKALEWLAHIFSNDKKSYSTSLKSRLT |
| | ISKDTSKSQVVLTMTNMDPVDTATYYCARHYYDTG |
| | AYYVPFDHWGQGTLVTVSS |
| 988 | QITLKESGPTLVKPTQTLTLTCTFSGFSLSTTGVG |
| | LAWIRQPPGKALEWLAFIYWDDDKRYSPSLQTRLT |
| | ITKDTSKNQVVLTLTNMDPMDTATYYCAHFQGFGE |
| | SEYFQHWGQGTLVTVSS |
| 989 | QITLKESGPTLVKPTQTLTLTCTFSGFSLSTSGVG |
| | VGWIRQPPGKALEWLALIFWDDDKRYSPSLKSRLT |
| | ITKDTSKNQVVLTMTNMDPVDTATYYCAHRHPLTG |
| | FDSWGQGTLVTVSS |
| 990 | EVQLVESGGGLVKPGGSLRLSCAASGFTFSSYSMN |
| | WVRQAPGKGLEWVSSISSSSSYIYYADSVKGRFTI |
| | SRDNAKNSLYLQMNSLRAEDTAVYYCATPRGYSYG |
| | PLDYWGQGTLVTVSS |
| 991 | EVQLVESGGGLVKPGGSLRLSCAASGFTFSSYSMN |
| | WVRQAPGKGLEWVSSISSSSSYIYYADSVKGRFTI |
| | SRDNAKNSLYLQMNSLRAEDTAVYYCASPRGYSYG |
| | PFDYWGQGTLVTVSS |
| 992 | QVQLVESGGGVVQPGRSLRLSCAASGFTFSSYAMH |
| | WVRQAPGKGLEWVAVISYDGSNKYYADSVKGRFTI |
| | SRDNSKNTLYLQMNSLRAEDTAVYYCARDRVDKGY |
| | DFWSSWYFDLWGRGTLVTVSS |
| 993 | QVQLVESGGGVVQPGRSLRLSCAASGFTFSSYAMH |
| | WVRQAPGKGLEWVAVISYDGSNKYYADSVKGRFTI |
| | SRDNSKNTLYLQMNSLRAEDTAVYYCASGGGSYFD |
| | AFDIWGQGTMVTVSS |
| 994 | QVQLVESGGGVVQPGRSLRLSCAASGFTFSSYAMH |
| | WVRQAPGKGLEWVAVISYDGSNKYYADSVKGRFTI |
| | SRDNSKNTLYLQMNSLRAEDTAVYYCARDRSGSYY |
| | GGFDYWGQGTLVTVSS |
| 995 | QVQLVESGGGVVQPGWSLRLSCAASGFTFGSYGMH |
| | WVRQAPGKGLEWVALIWNDGSNKYYADSVKGRFTI |
| | SRDKSKNTLYLQMNSLRAEDTAVYYCAKAVYGGNS |
| | VYFDYWGQGTLVTVSS |
| 996 | QVQLVESGGGVVQPGRSLRLSCAASGFTFSSYAMH |
| | WVRQAPGKGLEWVAVISYDGSNKYYADSVKGRFTI |
| | SRDNSKNTLYLQMNSLRAEDTAVYYCARIYGGNYE |
| | NYFDYWGQGTLVTVSS |
| 997 | QVQLVESGGGVVQPGRSLRLSCAASGFTFSIYAMH |
| | WVRQAPGKGLEWVAVISYDGSNKYYADSVKGRFTI |
| | SRDNSKNTLYLQMNSLRAEDTAVYYCARESEAGTT |
| | PSFDYWGQGTLVTVSS |
| 998 | EVQLVESGGGLVQPGGSLRLSCAASGFTVSSNYMS |
| | WVRQAPGKGLEWVSVIYSGGSTNYADSVKGRFTIS |
| | RDNSKNTLYLQMNSLRAEDTAVYYCARSLVRGVIT |
| | YFDYWGQGTLVTVSS |
| 999 | EVQLVESGGGLVQPGGSLRLSCAASGFTFSNYWMN |
| | WVRQAPGKGLEWVANIKEDGSETYYVDSVKGRFTI |
| | SRDNAKNSLYLQMNSLRAEDTAVYYCARGLSMEVW |
| | GQGTTVTVSS |
| 1000 | QVQLQQWGAGLLKPSETLSLTCAVYGGSFSGYYWS |
| | WIRQPPGKGLEWIGEIDHSGSTNDNPSLKSRVTIS |
| | VDTSKNQFSLKLSSVTAADAAVYYCARGGYSSSWY |
| | GTKYYFDYWGQGTLVTVSS |
| 1001 | QVQLQQWGAGLLKPSETLSLTCAVYDGSFSGHYWS |
| | WIRQPPGKGLEWIGEINHSGSTNYNPSLKSRVTIS |
| | VDTSKNQFSLKLSSVTAADTAVYYCARGPTVTTFF |
| | RRNAWFDPWGQGTLLTVSS |
| 1002 | QVQLQQWGAGLLKPSETLSLTCAVYGGSFSGYYWS |
| | WIRQPPGKGLEWIGEINHSGSTNYNPSLKSRVTIS |
| | VDTSKNQFSLKLSSVTAADTAVYYCARGRYSSGWY |
| | GSRNWFDPWGQGTLVTVSS |
| 1003 | QVQLQESGPGLVKPSETLSLTCTVSGGSISSYYWS |
| | WIRQPPGKGLEWIGYIYYSGSTNYNPSLKSRVTIS |
| | VDTSKNQFSLKLSSVTAADTAVYYCARLSMGAARQ |
| | SGFDPWGQGTLVTVSS |
| 1004 | QVQLQESGPGLVKPSETLSLTCTVSGGSISSYYWS |
| | WIRQPPGKGLEWIGYIYYSGSTNYNPSLKSRVTIS |
| | VDTSKNQFSLKLSSVTAADTAVYYCARDGGRDGYN |
| | ELGARVYYYYGMDVWGQGTTVTVSS |
| 1005 | EVQLVQSGAEVKKPGESLRISCKGSGYNFTSYWIS |
| | WVRQMPGKGLEWMGTIDPSDSYTNYRPSFQGHVTI |
| | SADKSINTAYLQWSSLKASDTAMYYCARIGSYGIW |
| | GQGTLVTVSS |
| 1006 | QVQLVQSGSELKKPGASVKVSCKASGYTFTSYAMN |
| | WVRQAPGQGLEWMGWINTNTGNPTYAQGFTGRFVF |
| | SLDTSVSTAYLQISSLKAEDTAVYYCAKLGCSGGS |
| | CYYYYGMDVWGQGTTVTVSS |
| 1007 | EVQLVESGGGLIQPGGSLRLSCAASGFTVSSNYVS |
| | WVRQAPGTGLEWVSVVYSGGHAYYADSVKGRFTMS |
| | RDNSENAVYLQMNSLRAEDTAVYYCARGDHYYDRS |
| | GPHKFDYWGQGTLVTVSs |
| 1008 | QVQLQESGPGLVKPSQTLSLTCTVSGGSISSGLYH |
| | WSWIRQPAGKGLEWIGRIFSSGSTAYSPSLKSRVI |
| | ISADTSKNQFSLKLSSVTAADTAVYYCARDSPLKF |
| | DSFGYPLYGMDVWGQGTTVTVSS |
| 1009 | QVQLVQSGAEVKKPGSSVKVSCKASGGTFSSYTIS |
| | WVRQAPGQGLEWMGRIIPILGIANYAQKFQGRVTI |
| | TADKSTSTAYMELSSLRSEDTAVYYCARGIVGATP |
| | GYFDYWGQGTLVTVSS |
| 1010 | QVQLVQSGAEVKKPGASVKVSCKASGFTFGRHGIT |
| | WVRQAPGQGLEWMGWISTYSGNTNYAQNLQGRVTM |
| | TTDTSTNTAYMELRSLFFDDTAVYYCAKAVSGWPI |
| | YFDAWGQGTLVTVSS |
| 1011 | QIQLVQSGAEVKKPGASVRVSCKASGFTFGRYGIT |
| | WVRQVPGQGLEWMGWISTYSGNTNYAQNLQGRVTM |
| | TTDTSTNTAYMELRSLFFDDTAMYYCAKAVSGWPI |
| | YFDAWGQGTLVTVSS |
| 1012 | QITLEESGPTLVKPTQTLTLTCTFSGFSLTTRGEG |
| | VAWIRQPPGKALEWLALIYWDDDQRYTPSLDSRLT |
| | ITKDISKNHVVLTLTDVEPVDTATYFCAHTIHSGY |
| | DRTFDSWGQGTLVIVSS |
| 1013 | QVQLVQSGSELKKPGASVKVSCKASGYTFTFYTIY |
| | WVRQAPGQGLEWMGWINTNTGTPTYAQGFTGRFVF |
| | SLDTSVSTAYLQISSLKAEDTAIYYCAREESYSSS |
| | SPLDYWGPGTLVAVSS |
| 1014 | QMQLVQSGPEVKKPGTSVKVSCKASGFTFTSSAVQ |
| | WVRQARGQRLEWIGWIVVGSGNTNYAQKFQERVTI |
| | TRDMSTSTAYMELSSLRSEDTAVYYCAAGSDFWSG |
| | YYVNYYMDVWGKGTTVTVSS |
| 1015 | QVTLRESGPALVKPTQTLTLTCTFSGFSLSTSGMC |
| | VSWIRQPPGKALEWLARIDWDDDKYYSTSLKTRLT |
| | ISKDTSKNQVVLTMTNMDPVDTATYYCARLTAAGV |
| | YFDYWGQGTLVTVSS |
| 1016 | EVQLLESGGGVVQPGGSLRLSCAASGFTFTTYAMN |
| | WVRQAPGRGLEWVSAISDSGGSAYYADSVKGRFTI |
| | SRDNSKNTLYLQMNSLRAEDTAVYYCAKTRGRGLY |
| | DYVWGSKDYWGQGTLVTVSS |
| 1017 | EVQLLESGGGVVQPGGSLRLSCAASGFAFTTYAMN |
| | WVRQAPGRGLEWVSAISDGGGSAYYADSVKGRFTI |
| | SRDNSKNTLYLQMNSLRAEDTAVYYCAKTRGRGLY |
| | DYVWGSKDYWGQGTLVTVSS |
| 1018 | QVQLVQSGAEVKKPGASVKVSCKASGYTFTSYGIS |
| | WVRQAPGQGLEWMGWISAYNGNTNYAQKLQGRVTM |
| | TTDTSTSTAYMELRSLRSDDTAVYYCARDESGSYY |
| | GDQAFDIWGQGTMVTVSS |
| 1019 | QAQLVQSGPEVKKPGASVKVSCEASGYTFSRYGIS |
| | WVRQAPGQGLEWMGWISGYNGNTTSEQKVQGRVTM |
| | TTDTSTNKVFLELRSLRSDDTAMYYCARDRRARAY |
| | EIPFGSDHYYFGMDVWGQGTTVTVSS |
| 1020 | QVQLVQSGAEVKKPGASVKVSCKASGYTFTGYYMH |
| | WVRQAPGQGLEWMGWINPNSGGTNYAQKFQGRVTM |
| | TRDTSISTAYMELSRLRSDDTAVYYCARDYYGSGS |
| | YPIGYMDVWGKGTTVTVSS |
| 1021 | EVQLVESGGGLAKPGGSLRVSCVVSGSGFTFRNAW |
| | MSWVRQAPGKGLEWVGRIKSKNDGGTTDYAASVKG |
| | RFTISRDDSKNSLDLQMQSLKTEDTAVYYCTTSYC |
| | STKVCFDYWFDPWGQGTLVTVSS |
| 1022 | QVQLVESGGDVVQPGNSLRLSCAASGFTFNFYGMH |
| | WVRQAPGKGLEWVAFISYDGNKRYYVDSVRGRFTA |
| | SRDNSKNTLFLQMNGLRNDDSAVYYCASNLYATSP |
| | YGGVKNWGRGTLVAVAS |
| 1023 | EVQLVESGGGLVQPGRSLRLSCAASGFTFDDYAMH |
| | WVRQAPGKGLEWVSGISWNSGSIGYADSVKGRFTI |
| | SRDNAKNSLYLQMNSLRAEDTALYYCAKDIGSGSP |
| | DAFDIWGQGTMVTVSS |
| 1024 | GVQLVESGGGLVQPGRSLRLSCAASGFIFDDYTMH |
| | WVRQAPTKGLEWVSGITWNYATVGYADSVRGRFTI |
| | SRDNVKNSLFLQIHSLRPDDTAFYYCVKDLEFRGG |
| | TGGFDLWGQGTLVTVSS |
| 1025 | QVQLVQSGAEVKKPGASVKVSCKASGYTFTSYGIS |
| | WVRQAPGQGLEWMGWISAYNGNTNYAQKLQGRVTM |
| | TTDTSTSTAYMELRSLRSDDTAVYYCARDGHSAWG |
| | AFDIWGQGTMVTVSS |
| 1026 | QVQLVQSGAEVKKPGASVKVSCKASGYTFTSYGIS |
| | WVRQAPGQGLEWMGWISAYNGNTNYAQKLQGRVTM |
| | TTDTSTSTAYMELRSLRSDDTAVYYCARDHPTLRR |
| | AFDYWGQGTLVTVSS |
| 1027 | QVELVQSGAQVRKPGASVKVSCKASGDTFNDYHMH |
| | WVRQAPGQGLEWMGWINPNSGETRYSQRFQGTVTM |
| | TRDTSISTVYMELRSLPSDDTAVYFCARDRGSSSW |
| | WGWLDPWGQGTLVTVSS |
| 1028 | QVQLVQSGAEVKKPGSSVKVSCKASGGTFSSYAIS |
| | WVRQAPGQGLEWMGGIIPIFGTANYAHKFQGRVTI |
| | TADESTSTAYMELSSLRSEDTAVYYCATRRGYSGY |
| | GAAYYFDYWGQGTLVTVSS |
| 1029 | QVQLVQSGAEVKKPGSSVKVSCKASGGTFSSYAIS |
| | WVRQAPGQGLEWMGRIIPILGIANYAQKFQGRVTI |
| | TADKSTSTAYMELSSLRSEDTAVYYCAREVYVGGE |
| | DDYSYYYGLDVWGQGTTVTVSS |
| 1030 | EVQLVESGGGLVKPGGSLRLSCAASGFTFSNAWMS |
| | WVRQAPGKGLEWVGRIKSKTDGGTTDYAAPVKGRF |
| | TISRDDSKNTLYLQMNSLKTEDTAVYYCTTDLGEA |
| | GPTEWLRSSLFDYWGQGTLVTVSS |
| 1031 | DIHMAESGGGLVKPGGSLRLSCAVSGLTFTKAWMS |
| | WVRQAPGKGPEWVGRIKSRSDGGKIDYAAPVKGRF |
| | IISRDDSKNTLYLQMHSLKTEDTALYYCTTSYCNP |
| | KVCFDYWFDPWGQGTLVTVSS |
| 1032 | EVQLLESGGGLVQPGGSLRLSCAASGFTFSTYAMS |
| | WVRQAPGKGLEWVSVISGSGGSTYYADSVKGRFTI |
| | SRDNSKNTLYLQMNSLRAEDTAVYYCAKEYYYDSS |
| | GYYYREDAFDIWGQGTMVTVSS |
| 1033 | EVQLLESGGGLVQPGGSLRLSCAASGFTFSNYAMT |
| | WVRQAPGKGLEWVSGISANGRSPYYADSVKGRFTI |
| | SRDNSKNTMYVQMNSLRVEDTAVYYCAKDGGLTAY |
| | LEYWGLGTLVTVSA |
| 1034 | EVQLLESGGGLVQPGGSLRLSCAASGFTFSSYAMS |
| | WVRQAPGKGLEWVSAISGSGGSTYYADSVKGRFTI |
| | SRDNSKNTLYLQMNSLRAEDTAVYYCATEKWEVVD |
| | VCFDYWGQGTLVTVSS |
| 1035 | QVQLVESGGGVVQPGRSLRLSCAASGFTFSSYGMH |
| | WVRQAPGKGLEWVAVISYDGSNKYYADSVKGRFTI |
| | SRDNSKNTLYLQMNSLRAEDTAVYYCAKDIGWDVV |
| | VVAATHGVFDYWGQGTLVTVSS |
| 1036 | QVQLVESGGGVVQPGRSLRLSCAASGFTFSSYGMH |
| | WVRQAPGKGLEWVAVISYDGSNKYYVDSVKGRFTI |
| | SRDNSKNTLYLQMNSLRAEDTAVYYCAKDPYYYGS |
| | GSSNFFDYWGQGTLVTVSS |
| 1037 | QVQLVESGGGVVQPGWSLRLSCAASGFTFSSFAMY |
| | WVRQAPGKGLEWVAVISYDGANKYYADSVKGRFTI |
| | SRDNSKNTLYLQVNSLRVEDTAVYYCARGPDYYDT |
| | GGYFDLWGRGTLVTVSs |
| 1038 | QVQLVESGGGVVQPGRSLRLSCAASGFTFSNYGMH |
| | WVRQAPGKGLEWVAVMWHDGSNKYHSDSVKGRFTI |
| | SRDNSKNTLYLQMKTLRADDTAVYYCARDGYKQIY |
| | WYLDLWGRGTLVTVSS |
| 1039 | QVQLVESGGGVVQPGRSLRLSCAASGFTFSSYGMH |
| | WVRQAPGKGLEWVAVIWYDGSNKYYADSVKGRFTI |
| | SRDNSKNTLYLQMNSLRAEDTAVYYCAKGEGVYGS |
| | GSRYFLDYWGQGTLVTVSS |
| 1040 | QVQLVESGGGVVQPGRSLRLSCAASGFTFSSYATH |
| | WVRQAPGKGLEWVAVISYDGSNKYHADSVKGRFTI |
| | SRDNSKNTLYLQMNSLRAEDTAVYYCAREWSRGAV |
| | AGTGYFDYWGQGTLVTVSS |
| 1041 | EVQLVESGGGLVQPGRSLRLSCAASGFTFHDYAMH |
| | WVRQAPGKGLEWVSGISWNSGSIGYADSVKGRFTI |
| | SRDNAKNSLYLQMNSLRAEDTALYYCAKVAKLPGD |
| | YYGMDVWGQGTTVTVSS |
| 1042 | EVQLVESGGGLIQPGGSLRLSCAASGVIVSRNYMN |
| | WVRQAPGKGLEWVSVIYSGGSTFYADSVKGRFTIS |
| | RDNSKNTLYLQMNSLRAEDTAVYYCARELRGAFDI |
| | WGQGTMVTVSS |
| 1043 | EVQLVESGGGLVQPGGSLRLSCAASGFTVSSNYMS |
| | WVRQAPGKGLEWVSVIYSGGTTYYADSVKGRFTIS |
| | RHNSKNTLYLQMNSLRAEDTAVYYCARDWGEYYFD |
| | YWGQGTLVTVSS |
| 1044 | EVQLVESGGGLIQPGGSLRLSCAASEFTVSSNYMS |
| | WVRQAPGKGLEWVSVIYSGGSTYYADSVKGRFTIS |
| | RDNSKNTLYLQMNSLRAEDTAVYYCARDYGDLYFD |
| | YWGQGTLVTVSS |
| 1045 | EVQLVESGGGLIQPGGSLRLSCAASGFTVSSNYMS |
| | WVRQAPGKGLEWVSVIYSGGSTYYADSVKGRFTIS |
| | RDNSKNTLYLQMNSLRAEDTAVYYCARDRRVGSPY |
| | YYYYMDVWGKGTTVTVSS |
| 1046 | EVQLVESGGGLVQPGGSLRLSCAASGFTVSSNYMS |
| | WVRQAPGKGLEWVSILYSGGTTYYADSVKGRFTIS |
| | RDNSKNTLYLQMNSLRAEDTAVYYCARDLGDNAFD |
| | IWGQGTMVTVSS |
| 1047 | EVQLVESGGGLVQPGGSLRLSCAASGITVSSNYMS |
| | WVRQAPGKGLEWVSVIYSGGSTYYADSVKGRITIS |
| | RDNSKNTLYLQMNSLRAEDTAVYYCARDRYSGYDF |
| | WGQGTLVTVSS |
| 1048 | EVQLVESGGGLVQPGGSLRLSCAASGFTVSSNYMS |
| | WVRQAPGKGLEWVSVIYSGGSTYYADSVKGRFTIS |
| | RDNSKNTLYLQMNSLRAEDTAVYYCARLSGTGYGG |
| | DGGWFDPWGQGTLVTVSS |
| 1049 | EVQLVESGGGLVQPGGSLRLSCAASGFTFSSYWMH |
| | WVRQAPGKGLVWVSRIKSDGSSTSYADSVKGRFTI |
| | SRDNAKNTLYLQMNSLRAEDTAVYYCAGKKIYYGS |
| | SFDPWGQGTLVTVSS |
| 1050 | QVQLQESGPGLVKPSQTLSLTCTVSGGSISSGGYY |
| | WSWIRQHPGKGLEWIGYIYYSGSTYYNPSLKSRVT |
| | ISVDTSKNQFSLKLSSVTAADTAVYYCARGGSGSG |
| | WYGGRFDYWGQGTLVTVSS |
| 1051 | QVQLQESGPGLVKPSQTLSLTCTVSGGSISSGGYY |
| | WSWIRQHPGKGLEWIGYIYYSGSTYYNPSLKSRVT |
| | ISVDTSKNQFSLKLSSVTAADTAVYYCARVWRETY |
| | YYDSSGDSFDYWGQGTLVTVSS |
| 1052 | QVQLQQWGAGLLKPSETLSRTCAVYGGSFSGYYWT |
| | WIRQSPGKRLEWIGEISHGGKTNYNIFFEGRVTLS |
| | VDSSKSQFSLTLASVTAADTAIYYCARGRSITGIR |
| | DVDFWGQGALVTVSS |
| 1053 | QVQLHQWGAGLLKPSETLSLTCAVSGGSFSDDFWN |
| | WIRQPPGKGLEWIGEINHSGTTNYNPSLKSRITMS |
| | VDTSKSQFSLKLNSVTAADSAMYFCARGRGNYMFR |
| | WFDPWGQGTLVTVSS |
| 1054 | QVQLQESGPGLVKPSETLSLTCTVSGGSISSYYWS |
| | WIRQPPGKGLEWIGYIYYSGSTNYNPSLKSRVTIS |
| | VDTSKNQFSLKLSSVTAADTAVYYCARGGLWYDSI |
| | NYYGMDVWGQGTTVTVSS |
| 1055 | EVQLVQSGAEVKKPGESLKISCKGSGYSFTSYWIG |
| | WVRQMPGKGLEWMGIIYPGDSDTRYSPSFQGQVTI |
| | SADKSISTAYLQWSSLKASDTAMYYCARLILRWPT |
| | TWDYFDYWGQGTLVTVSS |
| 1056 | QVQLVQSGTEVKEPGSSVKVSCKASGDTFSNYPIA |
| | WVREAPGQGLEWMGRIIPIVGFANYAQKFQGRVTI |
| | TADKSTSTAYMELSSLRFEDTAVYYCARVDGPFDY |
| | WGQGTLVTVSS |
| 1057 | QVQLVESGGGVVQPGRSLRLSCAASGFTFSTSAMH |
| | WVRQAPGKGLEWVAGISYDGSNEHLDSVKGRFTIS |
| | RDNSKNTLYLQMSSLRPEDTAVYYCARCPFWNYGH |
| | CYLDNWGQGTLVTVSS |
| 1058 | QVQLVESGGGVVQPGGSLRLSCAASGFTFSTYAMH |
| | WLRQAPGRGLEWVAVISYDGSNKYNADSVKGRFTI |
| | SRDNSKNTLSLHMNSLRPEDTAVYYCARPSVRWYY |
| | HAMDVWGQGTTVTVTS |
| 1059 | EMQLLESGGGLVQPGGSLRLSCAASGFTFFSYALS |
| | WVRQAPGKGLEWVSGISGISDSGGNTYYADSVKGR |
| | FTISRDNSQNMLYLQMNSLRVEDTAVYYCAKERRP |
| | VLRYFDWLPIEAPDYWGPGTLVTVSS |
| 1060 | EVQLVESGGGLVQPGGSLRLSCAASGFTVSSNYMN |
| | WVRQAPGKGLEWVSVIYSGGSTYYADSVKGRFTLS |
| | RDNSKNTLYLQMNSLRAEDTAVYYCARGQYDILTG |
| | YQYGAFDIWGQGTMVTVSS |
| 1061 | QVQLQESGPGLVKPSQTLSLTCTVSAGSISSDTYY |
| | WSWIRQPAGKGLEWIGRIYTTGSTIYNPSLNSRVL |
| | ISADTSNNQFSLKLTSVTASDTAVYYCAAHYYSRT |
| | DAFHIWGQGTMVTVSS |
| 1062 | QVQLVQSGAEVKKPGASVKVSCKASGYTFTSYGIS |
| | WVRQAPGQGLEWMGWISAYNGNTNYAQKLQGRVTM |
| | TTDTSTSTAYMELRSLRSDDTAVYYCARDSVSGSG |
| | SYYKGLWFDPWGQGTLVTVSS |
| 1063 | QVQLVQSGAEVKKPGASVKVSCKASGYTFTNYYMH |
| | WMRQAPGQGLEWMGIINPSGGSTSYAHQFQGRVTM |
| | TRDTSTSTVYMEMSSLRSEDTAVYFCVVGIGYCSS |
| | PSCPPLRWFDYWGQGTLVTVSS |
| 1064 | QVQLVQSGAEVKKPGSSVKVSCKASGGTFSSYTIS |
| | WVRQAPGQGLEWMGRIIPILGIANYAQKFQGRVTI |
| | TADKSTSTAYMELSSLRSEDTAVYYCARERGYSGS |
| | GSLYYFDYWGQGTLVTVSS |
| 1065 | QITLKESGPTLVKPTQTLTLTCTFSGFSLSTSGVG |
| | VGWIRQPPGKALEWLALIYWDDDKRYSPSLKSRLT |
| | ITKDTSKNQVVLTMTNMDPVDTATYYCAHYSSSRP |
| | PLFDYWGQGTLVTVSS |
| 1066 | EAQLLESGGGLVQPGGSLRLSCAVSGFTVSSYDMS |
| | WVRQAPGKRLEWVSFISARGSVTYYADSVRGRFTI |
| | SRDNFKNTLYVEMNNLRVEDTAVYYCAKGHWSTWG |
| | QGTLVTVSS |
| 1067 | QVQLVESGGGVVQPGRSLRLSCAASGFTFRNYGMH |
| | WVRQAPGKGLEWVAVISYDGSNKYYADSVKGRFTI |
| | SRDNSKSTLYLQMNSLRAEDTAVYYCANGAYYYGS |
| | GSYYNGAAYWGQGTLVTVSS |
| 1068 | QVQLVESGGGVVQPGKSLRLSCAASGFTFSSYGMH |
| | WVRQAPGKGLEWVAVISNYGSNKYHADSVKGRITI |
| | SRDNSKNTLYLQMNSLRAEDTAVYYCAKGGYYDIL |
| | TGYFPFDYWGQGTLVTVSS |
| 1069 | EVQLVESGGGLIQPGGSLRLSCAASGFTVSRNYMS |
| | WVRQAPGKGLEWVSLIYSGGSTFYADSVKGRFTIS |
| | RDNSKNTLYLQMNTLRSEDTAVYYCARDLVVYGMD |
| | VWGQGTTVTVSS |
| 1070 | EVQLVESGGGLVQPGGSLRLSCAASGFTVSSNYMS |
| | WVRQAPGKGLEWVSVIYSGGSTYYADSVKGRFTIS |
| | RDNSKNTLYLQMNSLRAEDTAVYYCARDPIRNGMD |
| | VWGQGTTVTVSS |
| 1071 | EVQLVESGGGLVQPGGSLRLSCAASGFTVSRNYMS |
| | WVRQAPGKGLEWVSVIYSGGTTHYADSVKGRFTIS |
| | RHNSKNTLYLQMNSLRAEDTAVYYCARDLVVYGMD |
| | VWGQGTTVTVSS |
| 1072 | EVQLVESGGGLIQPGGSLRLSCAASGLTVSSNYMT |
| | WVRQAPGKGLEWVSVIYSGGSTFYADSVKGRFTIS |
| | RHNSKNTLYLQMNSLRAEDTAVYYCARDAMSYGMD |
| | VWGQGTTVTVSS |
| 1073 | EVQLVESGGGLIQPGGSLRLSCAASGFTVSSNYMS |
| | WVRQAPGKGLEWVSVIYSGGSTYYADSVKGRFTIS |
| | RDNSKNTLYLQMNSLRAEDTAVYYCARDRVVYGMD |
| | VWGQGTTVTVSS |
| 1074 | EVQLVESGGGLIQPGGSLRLSCAASGLIVSSNYMS |
| | WVRQAPGKGLEWVSVLYAGGSTDYAGSVKGRFTIS |
| | RDNSKNTLYLQMNSLRAEDTAVYYCARDAAVYGID |
| | VWGQGTTVTVSS |
| 1075 | EVQLVESGGGLVQPGGSLRLSCAASGITVRSNYMS |
| | WVRQAPGKGLEWVSVIYSGGSTFYADSVKGRFTIS |
| | RDNSKNTLYLQMNSLRAEDTAVYYCARDLISRGMD |
| | VWGQGTTVTVSS |
| 1076 | EVQLVESGGGLIQPGGSLRLSCAASGFTVSSNYMN |
| | WVRQAPGKGLEWVSVIYSGGSTFYADSVKGRFTIS |
| | RDNSKNTLYLQMNSLRAEDTAVYYCARDRVVYGMD |
| | VWGQGTTVTVSS |
| 1077 | EVQLVESGGGLVQPGGSLRLSCAASGVTVSSNYMS |
| | WVRQAPGKGLEWVSVIYSGGSTNYADSVKGRFTIS |
| | RDNSKNTLYLQMNSLRAEDTAVYYCARDLVSYGMD |
| | VWGQGTTVTVSS |
| 1078 | EVQLVESGGGLIQPGGSLRLSCAASGLTVSSNYMN |
| | WVRQAPGKGLEWVSVIYSGGSTYYADSVKGRFTIS |
| | RDNSKNMVYLQMNSLRAEDTAVYYCARDLVVYGMD |
| | VWGQGTTVTVSS |
| 1079 | EVQLVESGGGLVQPGGSLRLSCAASGFIVSSNYMT |
| | WVRQAPGKGLEWVSVIYSGGSTFYADSVKGRFTIS |
| | RHNSKNTLFLQMNSLRAEDTAVYYCARDAQNYGMD |
| | VWGQGTTVTVSS |
| 1080 | EVQLVESGGGLVQPGGSLRLSCAASEFIVSRNYMS |
| | WVRQAPGKGLEWVSVIYSGGSTFYADSVKGRFTIS |
| | RDNSKNTLYLQMNSLRAEDTGVYYCARDRGLVSDY |
| | WGQGTLVTVSS |
| 1081 | DIEMTQSPSSLSASVGDRVTITCRASQSIASYAYW |
| | YQQKPGKAPKLLISAASILQSGVPSRFSGSGSGGH |
| | FTLTINSLQPEDVATYYCQQTYIIPYSFGQGTKLE |
| | IK |
| 1082 | AIRMTQSPSSFSASTGDRVTITCRASQGISSYLAW |
| | YQQKPGKAPKLLIYAASTLQSGVPSRFSGSGSGTD |
| | FTLTISCLQSEDFATYYCQQYYSYPYTFGQGTKLE |
| | IK |
| 1083 | QSALTQPPSASGSPGQSVTISCTGTSSDVGGYNYV |
| | SWYQQHPGKAPKLMIYEVSKRPSGVPDRFSGSKSG |
| | NTASLTVSGLQAEDEADYYCSSYAGSNNLVFGGGT |
| | KLTVL |
| 1084 | GIQMTQSPSTLSASVGDRVTITCRASQSISDWLAW |
| | YQQKPGKIPKLLIYKASTLESGVPSRFSGSGSGTE |
| | FTLTISSLQPDDFGTYYCQRYDSYRTFGQGTKVEI |
| | K |
| 1085 | DIQMTQSPSSLSASVGDRVTITCRASQSISSYLNW |
| | YQQKPGKSPKLLIYAASTLQSGVPSRFSGSGSGTD |
| | FTLTISSLQPEDFATYYCQQSYSTPYTFGQGTKLE |
| | IK |
| 1086 | DIQMTQSPSSLSASVGDRVTITCQASQDISNYLNW |
| | YQQKPGKAPKVLIYDASNLKTGVPSRFSGSGSGTD |
| | FTFTISSLQPEDIATYYCQQYDNLPLTFGQGTRLE |
| | IK |
| 1087 | EIVLTQSPGTLSLSPGERATLSCRASQSVSSSYLA |
| | WYQQKPGQAPRLLIYGASHRASGIPDRFSGSGSGT |
| | DFTLTISRLEPGDFAMYYCQQYATSPWTFGQGTTV |
| | EIK |
| 1088 | QSVLAQPPSASGTPGQSVTISCSGNNSNIGINNVY |
| | WYQQFPGTAPKLLIHRSNQRPSGVPDRFSGSRSGT |
| | SASLVISGLRSEDEAEYHCAAWDDSLSSWGFGGGT |
| | KLTVL |
| 1089 | QLVLTQSPSASASLGASVKLTCTLSSGHSSYAIAW |
| | HQQQPEKGPRYLMKLSSDGSHRKGDGIPDRFSGSS |
| | SGAERYLTISSLQSEDEADYYCQTWGTGTVVFGGG |
| | TKLTVL |
| 1090 | SYELTQPPSVSVSPGQTARITCSGDALPKQYAYWY |
| | QQKPGQAPVLVIYKDSERPSGIPERFSGSSSGTTV |
| | TLTISGVQAEDEADYYCQSADSSGTWVFGGGTKLT |
| | VL |
| 1091 | EIVLTQSPATLSLSPGERATLSCRASQSISSYLAW |
| | YQQKPGQAPRLLIYEAANRATGIADRFSGSGSGTD |
| | FTLTISSLEPEDFAIYYCQQRSDWTPTFGQGTKVE |
| | IK |
| 1092 | AIQLTQSPSSLSASVGDRVTITCRASQGISSALAW |
| | YQQKPGKAPKLLIYDASSLESGVPSRFSGSGSGTD |
| | FTLTISSLQPEDFATYYCQQFNSYPRTFGGGTKVE |
| | IK |
| 1093 | QSALTQPASVSGSPGQSITISCTATSSDFGTFHLV |
| | SWYQQHPGKAPQLMIYEVNKRPSGVSDRFSASKSG |
| | NTASLTISGLQPEDEADYYCCSYAGNTTFFGGGTK |
| | LTVL |
| 1094 | QAVLTQPPSVSAAPGQRVSISCSGSAFNIGTNFVS |
| | WYQHLPGAAPKLLIYGDQWRISGTPDRFSGSKSGT |
| | SATLAITGLQSGDEAHYYCSTWDASLKEVLFGGGT |
| | RLDVL |
| 1095 | DVVMTQSPLSLPVTLGQPASISCRSSQSLVYYDGN |
| | TYLNWFQQRPGQSPRRLIYKVSNRDSGVPDRFSGS |
| | GSGTDFTLKISRVEAEDVGVYYCMQGTHWPLTFGP |
| | GTKVDIK |
| 1096 | DIQMTQSPSTLSASVGDSVTITCRPSQSISRWLAW |
| | YQQKPGKAPKLLIYKASTLESGVPSRFSGSGSGTE |
| | FTLTISSLQPDDFATYYCQQYDSYPWTFGQGTKVE |
| | IK |
| 1097 | DIQLTQSPSFLPASVGDRVTITCRASQHISNYVAW |
| | YQQKPGKAPKLLIYAASTLESGVPSRFGGSGSGTE |
| | FTLTINSLQPEDFATYYCQQLTTYPRTFGQGTKLE |
| | IK |
| 1098 | SYELTQPPSVSVSPGQTARITCSGDALPKQYAYWY |
| | QQKPGQAPVLVIYKDSERPSGIPERFSGSSSGTTV |
| | TLTISGVQAEDEADYYCQSADSSGTWVFGGGTKLT |
| | VL |
| 1099 | DIVMTQSPDSLAVSLGERATINCKSSQSVLYSSNN |
| | NKNYLAWYQQKPGQPPKLLIYWASTRESGVPDRFS |
| | GSGSGTDFTLTISSLQAEDVAVYFCQQFYSTPVTF |
| | GPGTKVDIK |
| 1100 | NFMLTQPHSLSESPGKTVTISCTGSGASIASNYVQ |
| | WYQQRPGSAPVTVIFEDTQRPSGVPDRFSGSIDRS |
| | SNSASLTISGLRTEDEADYYCQSYDGSNVVFGGGT |
| | KLTVL |
| 1101 | DIVMTQSPDSLAVSLGERATINCKSSQSVLYSSNN |
| | KNYLAWYQQKPGQPPKLLIYWASTRESGVPDRFSG |
| | SGSGTDFTLTISSLQAEDVAVYYCQQYYSTPLTFG |
| | GGTKVEIK |
| 1102 | DIVMIQSPDSLAVSLGERATINCKSSHSVFFSKVN |
| | KDYLAWYQQKPGLPPKLLIYWASTRQTGVPDRFSG |
| | SGSGTDFSLTISNLQAEDVAVYYCQQYYDTPMYTF |
| | GQGTKLEIK |
| 1103 | DIQMTQSPSTLSASVGDRVTITCRASQSISSWLAW |
| | YQQKPGKAPKLLIYKASSLESGVPSRFSGSGSGTE |
| | FTLTISSLQPDDFATYYCQQYNSYPYTFGQGTKLE |
| | IK |
| 1104 | QSALTQPASVSGSPGQSITISCTGTSSDVGGYNYV |
| | SWYQQHPGKAPKLMIYDVSKRPSGVSNRFSGSKSG |
| | NTASLTISGLQAEDEADYYCSSYTSSSTFVFGTGT |
| | KVTVL |
| 1105 | SYELTQPPSVSVSPGQTARITCSGDALPKQYAYWY |
| | QQKPGQAPVLVIYKDSERPSGIPERFSGSSSGTTV |
| | TLTISGVQAEDEADYYCQSADSSGTYSNWVFGGGT |
| | KLTVL |
| 1106 | QSALTQPASVSGSPGQSITISCTGTSSDVGGYNYV |
| | SWYQQHPGKAPKLMIYDVSNRPSGVSNRFSGSKSG |
| | NTASLTISGLQAEDEADYYCSSYTSSSTVVFGGGT |
| | KLTVL |
| 1107 | EIVLTQSPGTLSLSPGERATLSCRASQSVSSSYLA |
| | WYQQKPGQAPRLLIYGASSRATGIPDRFSGSGSGT |
| | DFTLTISRLEPEDFAVYYCQQYGSSPLTFGGGTKV |
| | EIK |
| 1108 | EIVLTQSPGTLSLSPGERATLSCRASQSVSSSYLA |
| | WYQQKPGQAPRLLIYGASSRATGIPDRFSGSGSGT |
| | DFTLTISRLEPEDFAVYYCQQYGSSPLTFGGGTKV |
| | EIK |
| 1109 | DFQMTQSPSSLSASVGDRVTISCQASEDIDNHLNW |
| | YQQKPGKAPRLLIYDASNLETGVPSRFSGSGSGTD |
| | FLFTITSLQPEDFATYYCQQYGAFGQGTKVEIK |
| 1110 | EIVLTQSPGTLSLSPGERATLSCRASQSVSSSYLA |
| | WYQQKPGQAPRLLIYGASSRATGIPDRFSGSGSGT |
| | DFTLTISRLEPEDFAVYYCQQYGSSPWTFGQGTKV |
| | EIK |
| 1111 | QSVLTQPPSASGTPGQRVTISCSGSRSNIGSKNVH |
| | WYQQLPGTAPKFLIYSNNQRPSGVPDRFSGSKSGT |
| | SASLAISGLQSEDEADYYCAVWDDSLNGVVFGGGT |
| | KLTVL |
| 1112 | QSALTQPPSASGSPGQSVTISCTGTSSDVGSYHYV |
| | SWYQQHPGKAPKLIIYEVSKRPSGVPDRFSGSKSG |
| | NTASLTVSGLQTDDEADYYCSSFAGSNNPYVFGTG |
| | TKVTVL |
| 1113 | DIVMTQSPDSLAVSLGERATINCRSSQSVLYSANN |
| | KYYLAWYQHKPGQPPKLLIHWASTRESGVPDRFSG |
| | SGSGTDFTLTISSLQAEDVAIYYCQQYYSTPYTFG |
| | QGTKLEIK |
| 1114 | EIVMTQSPATLSVSPGERATLSCRASQSVKSYLAW |
| | YQQKAGQAPRLLIYGASSRATGIPARFSGSRSGTE |
| | FTLTISSLQSEDFAVYFCHQYDSWPPTFGGGTKVE |
| | IK |
| 1115 | DVVLTQSPATLSLSPGERATLSCRASKDINSYLAW |
| | YQQKPGQAPRLLIYDASKRATGVPVRFSGSGSGTD |
| | FTLTISSLEPEDSAIYFCQNRDDWPPLFTFGPGTK |
| | VDFK |
| 1116 | DIVMTQSPDSLAVSLGERATINCKSSQSVLYSSNN |
| | KNYLAWYQQKPGQPPKLLIYWASTRESGVPDRFSG |
| | SGSGTDFTLTISSLQAEDVAVYYCQQYYSTPRTFG |
| | QGTKLEIK |
| 1117 | DMQMTQSPSSVSASVGDRVTITCRASQDISSSLAW |
| | YQQKPGKPPKLLIYAASSLQRGVPSRFSGSGSGTD |
| | FTLTISSLQPEDFATYYCQQAHSFLSLTFGGGTKV |
| | EIK |
| 1118 | SCELTQPPSVSVSPGQTARITCSGDALSNQYTYWY |
| | QQRPGQAPLLVIYKGTKRPSAIPERFSGSRSGTTV |
| | TLTISGVQAEDEADYYCQSADTSGTYLWVFGGGTK |
| | LTVL |
| 1119 | DIQMTQSPSSLSASVGDRVTITCQASQDISNFLNW |
| | YQQKPGKAPELLIYDASNLETGVPSRISGSGSGTD |
| | FTFTISSLQPEDIATYYCQQYDSLPITFGQGTRLE |
| | IK |
| 1120 | DIQMTQSPSSLSAVLGDRVTITCRASQAISNSLAW |
| | YQQKPGKAPKLLLYAASRLESGVPSRFSGSGSGTD |
| | YTLTISSLRPEDFATYYCQQYYGIPTFGQGTRLEN |
| | K |
| 1121 | DVQMTQSPSSLSASVGDRVTITCQASRDIHNLLNW |
| | YQQKPGKAPKLLIYDASNLETGVPSRFSGSGSGTD |
| | FTFTITGLQPEDVATYYCQKCDNFPWTFGQGTKVE |
| | IK |
| 1122 | QSVLTQSPSASGTPGQRVTISCSGSNSNIGSNYVF |
| | WYHQLPGTTPKLLIYKNNQRPSGVPDRFSGSKSGT |
| | SASLAISGLRSEDEADYYCAAWDDSLSVVVFGGGT |
| | KLTVL |
| 1123 | DIHMTQSPSSLSASEGDRVTISCRASQGISTNYLN |
| | WYQQKSGKAPRLLIYATSTLQSGVSSRFSGSGSGT |
| | DFTLTINSVQPEDFATYYCQQSYSSPPTFGGGTKL |
| | DIK |
| 1124 | QSVLTQPPSVSGAPGQRVTISCTGIGARYNVHWYQ |
| | QVPGTAPKLLIYRNTNRPSGVPDRFSGSKSDTSAS |
| | LAITGLQAEDEADYYCQSYDDTLTIFGGGTKLTVL |
| 1125 | DIQMTQSPSSLSASVGDRVTITCRASQSISNHFNW |
| | YQHRPQKAPKLLIYSASNLQSGVPSRFSGSGSGRN |
| | FTLTISSLQPEDFATYYCQQSYGAPPTFGGGTKVE |
| | IK |
| 1126 | DIQMTQSPSSLSASEGDRVTITCRANQSISTNYLN |
| | WYQQQSGKAPKLLIYASSTLQSGVPTRFSGSGSGT |
| | DFALTINSLQPEDFAAYYCQQSYSTPPTFGGGTRV |
| | DLR |
| 1127 | DIQMTQSPSSLSASEGDRVTILCRASQSISTNYLN |
| | WYQQKSGKAPKLLIYSTSNLQSGVPSRFSGSGSGT |
| | DFTLTIDSLQGEDFATYYCQQSFSTPPTFGGGTKV |
| | DIK |
| 1128 | DIQMTQSPSSLSASEGDRVTITCRANQSISTNYLN |
| | WYQQKSGKAPNLLIYATSSLERGVPSRFSGSGSGT |
| | EFSLTINSLQPEDFVTYYCQQSYSSPPTFGGGTKV |
| | EIKRMEIK |
| 1129 | SYELTQPPSVSVSPGQTARITCSGDALPKKYAYWY |
| | QQKSGQAPVLVIYEDSKRPSGIPERFSGSSSGTMA |
| | TLTISGAQVEDEADYYCYSTDSSGNHWVFGGGTKL |
| | TVL |
| 1130 | QAVVTQEPSLTVSPGGTVTLTCGSSTGAVTSGHYP |
| | YWFQQKPGQGPRTLIYDINNKYSWTPARFSGSLLG |
| | GKAALTLFGAQPEDEADYYCLLSYSGVRIFGGGTK |
| | LTVL |
| 1131 | QSVLTQPPSVSGAPGQRVTISCTGSSSNIGAGYDV |
| | HWYQQLPGTAPKLLIYGNSNRPSGVPDRFSGSKSG |
| | TSASLAITGLQAEDEADYYCQSYDSSLSKVFGGGT |
| | KLTVL |
| 1132 | SYELTQPPSVSVSPGQTASITCSGDKLGDKYACWY |
| | QQKPGQSPVLVIYQDSKRPSGIPERFSGSNSGNTA |
| | TLTISGTQAMDEADYYCQAWDSSTFYVFGTGTKVT |
| | VL |
| 1133 | QSVLTQPPSVSAAPGQKVTISCSGSSSNIGNNYVS |
| | WYQQLPGTAPKLLIYDNNKRPSGIPDRFSGSKSGT |
| | SATLGITGLQTGDEADYYCGTWDSSLSAVVFGGGT |
| | KLTVL |
| 1134 | EIVMTQSPATLSVSPGERATLSCRASQSVSSNLAW |
| | YQQKPGQAPRLLIYGASTRATGIPARFSGSGSGTE |
| | FTLTISSLQSEDFAVYYCQQYNNWPWTFGQGTKVE |
| | IK |
| 1135 | QAVVTQEPSLTVSPGGTVTLTCGSSTGAVTSGHYP |
| | YWFQQKPGQAPRTLIYDTSNKHSWTPARFSGSLLG |
| | GKAALTLSGAQPEDEAEYYCLLSYSGARPVFGGGT |
| | KLTVL |
| 1136 | DIQMTQSPSSLSASVGDRVTITCRASQSISSYLNW |
| | YQQKPGKAPKLLIYAASSLQSGVPSRFSGSGSGTD |
| | FTLTISSLQPEDFATYYCQQSYSTPPYTFGQGTKL |
| | EIK |
| 1137 | QSALTQPASVSGSPGQSITISCTGTSSDVGGYNYV |
| | SWYQQHPGKAPKLMIYDVSKRPSGVSNRFSGSKSG |
| | NTASLTISGLQAEDEADYYCSSYTSSSTRVVFGGG |
| | TKLTVL |
| 1138 | DIVMTQSPDSLAVSLGERATINCKSSQSVLYSSNN |
| | KNYLAWYQQKPGQPPKLLIYWASTRESGVPDRFSG |
| | SGSGTDFTLTISSLQAEDVAVYYCQQYYSTPITFG |
| | QGTRLEIK |
| 1139 | EIVLTQSPGTLSLSPGERATLSCRASQSVSSSYLA |
| | WYQQKPGQAPRLLIYGASSRATGIPDRFSGSGSGT |
| | DFTLTISRLEPEDFAVYYCQQYGSSPLTFGGGTKV |
| | EIK |
| 1140 | QSVLTQPPSVSAAPGQKVTISCSGSSSNIGNNYVS |
| | WYQQLPGTAPKLLIYDNNKRPSGIPDRFSGSKSGT |
| | SATLGITGLQTGDEADYYCGTWDSSLSVVVFGGGT |
| | KLTVL |
| 1141 | QSALTQPASVSGSPGQSITISCTGTSSDVGGYNYV |
| | SWYQQHPGKAPKLMIYDVSKRPSGVSNRFSGSKSG |
| | NTASLTISGLQAEDEADYYCSSYTSSSTFAVFGGG |
| | TQLTVL |
| 1142 | DIVMTQSPLSLPVTPGEPASISCRSSQSLLHSNGY |
| | NYLDWYLQKPGQSPQLLIYLGSNRASGVPDRFSGS |
| | GSGTDFTLKISRVEAEDVGVYYCMQALQTPLTFGG |
| | GTKVEIK |
| 1143 | DIVMTQSPLSLPVTPGEPASISCRSSQSLLHSNGY |
| | NYLDWYLQKPGQSPQLLIYLGSNRASGVPDRFSGS |
| | GSGTDFTLKISRVEAEDVGVYYCMQALQTVFTFGP |
| | GTKVDIK |
| 1144 | DIVMTQSPLSLPVTPGEPASISCRSSQSLLHSNGY |
| | NYLDWYLQKPGQSPQLLIYLGSNRASGVPDRFSGS |
| | GSGTDFTLKISRVEAEDVGVYYCMQALQTVFTFGP |
| | GTKVDIK |
| 1145 | DIEMTQSPSSLSASVGDRVTITCRASQSIASYAYW |
| | YQQKPGKAPKLLISAASILQSGVPSRFSGSGSGGH |
| | FTLTINSLQPEDVATYYCQQTYIIPYSFGQGTKLE |
| | IK |
| 1146 | AIRMTQSPSSFSASTGDRVTITCRASQGISSYLAW |
| | YQQKPGKAPKLLIYAASTLQSGVPSRFSGSGSGTD |
| | FTLTISCLQSEDFATYYCQQYYSYPYTFGQGTKLE |
| | IK |
| 1147 | SYVLTQPPSVSVAPGKTARITCGGNNIGSKSVHWY |
| | QQKPGQAPVLVIYYDSDRPSGIPERFSGSNSGNTA |
| | TLTISRVEAGDEADYYCQVWDSSSDHVVFGGGTKL |
| | TVL |
| 1148 | SYELTQPPSVSVSPGQTASITCSRDKLGDEYACWY |
| | QQKPGQSPILVIYQNNKRPAGIPERFSGSNSGNTA |
| | TLTISGTQAMDEADYYCQAWDSSTSYVVFGGGTKL |
| | TVL |
| 1149 | QSVLTQPPSVSAAPGQKVTISCSGSSSNIGNNYVS |
| | WYQQLPGTAPKLLIYDNNKRLSGIPDRFSGSKSGT |
| | SATLDITGLQTGDEADYYCGTWDSSLSVGVFGGGT |
| | KLTVL |
| 1150 | QSALTQPASVSGSPGQSITISCTGTSSDVGGYNYV |
| | SWYQQHPGKAPKLMIYDVSKRPSGVSNRFSGSKSG |
| | NTASLTISGLQAEDEADYYCNSYTSNSTAVFGGGT |
| | KLTVL |
| 1151 | EVVLTQSPATLSASPGERATLSCRASLSINTDLAW |
| | YQQRPGQPPRLLIYGASTRATGIPARFSGSGSGTE |
| | FTLTVSSLQSEDFALYYCQQSYNWPRTFGQGTRVE |
| | IK |
| 1152 | DIQMTQSPSAMSASVGDRVTITCRASQGMSNYLAW |
| | FQQKPGKVPKRLIYAASSLASGVPSRFSGSGSGTE |
| | FTLTISSLQPEDFATYYCLQHNSYPYTFGQGTKLE |
| | IK |
| 1153 | DIQMTQSPSTLSAPVGDRVTITCRASQSINSWLAW |
| | YQQKPGKAPKLLIYKASNLESGVSSRFSGSGSGTE |
| | FTLTISSLQPDDFATYYCQQYNGYPHTFGQGTKLE |
| | IK |
| 1154 | DIQMTQSPSTLSASVGDRVTITCRASQSISSWLAW |
| | YQQKPGKAPKLLIYKASNLESGVPSRFSGSGSGTD |
| | FTLTISSLQPDDFATYYCQQYSYYSAFGQGTQVEF |
| | K |
| 1155 | EIVLTQSPGTLSLSPGERASLSCRASQTVSSTYLA |
| | WYQQKPGQAPRLLIYGASSRATGIPDRFSGSGSGT |
| | DFTLTITRLEPEDFAVYYCQQYGTFGQGTKLEIK |
| 1156 | QAGLTQPPSVSKGLRQTATLTCTGTSSNVGNQGAA |
| | WLQQHQGHPPKLLSYRNDNRPSGISERLSASRSGN |
| | TASLTITGLQPEDEADYYCSAWDSSLSAWVFGGGT |
| | KLTVL |
| 1157 | DIVMTQSPDSLAVSLGERATINCKSSQSVLYNSNN |
| | KDYLAWYQQKPGQPPKLLFSWASTRQSGVPARFSG |
| | GGSGTDFTLTISSLQAEDVAVYYCQQYYSTPITFG |
| | GGTKVEIK |
| 1158 | DFVLTQPHSVSESPGKTVTISCTRSSGSIASYFVH |
| | WYQQRPGSAPTTVIYEDNQRPSGVPDRFSGSIDSS |
| | SNSASLIISGLKTEDEADYYCQSFDDNDQVFGGGT |
| | KLTVL |
| 1159 | QTVVTQEPSFSVSPGGTVTLTCGLTSGSVSTTYYP |
| | SWYQQTPGQPPRTLIYSTNIRSSGVPDRFSGSILG |
| | NKAALTITGAQADDESNYYCLLYVGGGIWVFGGGT |
| | KLTVL |
| 1160 | EIVMTQSPATLAVSPGERATLSCRASQSVSDNLAW |
| | YQQRPGQPPRLLIYAASTRATGIPPRFSGSGSGTE |
| | FTLTIASLQSEDFALYYCQQYNIWLTFGGGTKVEI |
| | K |
| 1161 | AVVMTQSPLSLPVTLGQPASISCRSSQSLVHSDGN |
| | TYLNWFQQRPGQSPRRLIYKVSDRDSGVPDRFSGS |
| | GSGTDFTLKINRVEAEDVGVYYCMQGTLLLTFGGG |
| | TKVEIK |
| 1162 | QSVLTQPPSVSAAPGQKVTISCSGSSSNIGNNYVS |
| | WYQQLPGTAPKLLIYDNNKRPSGVPDRFSGSKSGT |
| | SATLGITGLQTGDEADYYCETWDSSLDAVIFGGGT |
| | KLTVL |
| 1163 | QSVLTQPPSASGTPGQRVTISCSGSSSNIGSNYVY |
| | WYQQLPGTAPKVLIYRNNQRPSGVPDRFSGSKSGT |
| | SASLAISGLRSEDEADYYCAAWDDSLSGRVFGGGT |
| | KLTVL |
| 1164 | DVVVTQSPLSLSVTLGQPASISCRSSQSLVHSDGN |
| | TYLNWFQQRPGQSPRRLIYKVSNRDSGVPDRFSGS |
| | GSGTDFTLKISRVEADDVGVYYCMQGTHWPHPTFG |
| | QGTRVEIK |
| 1165 | AVVVTQSPLSLPVTLGQPASISCRSSQSLVYSDGN |
| | TYLNWFQQRPGQSPRRLIYKVSNRDSGVPDRFSGS |
| | GSGTDFTLQISKVEAEDVGVYYCMQGTPWPTFGQG |
| | TKVEIK |
| 1166 | EIVLTQSPGTLSLSPGERATLSCRASQSVRSNYLA |
| | WYQLKPGQAPRLLIYGASSRATGIPDRFSGSGSGT |
| | DFTLTISRLEPEDFAVYYCQQSGSSYTFGQGTKLE |
| | IK |
| 1167 | AIVMTQSPLSLPVTPGEPASISCRSSQSLRQSQRF |
| | SYLDWYVQKPGQSPQLLIYLNSRRAPGVPDRFSAS |
| | GSGTDFTLKISRVEAEDVGVYYCMQSLPSGFTFGP |
| | GTNVHIK |
| 1168 | DIVMTQAPLSLSVTPGQPASISCKSSQSLLHSIGK |
| | THLYWYLQKPGQPPQLLIYEVSNRFSGVPERVSGS |
| | GSGTDFTLTISRVEAEDVGVYYCMQSLDLPPTFGQ |
| | GTKVDIK |
| 1169 | DIQMTQSPSFVSASVGDRVTITCRASHDIRTWLSW |
| | YQQKPGKAPKLLIYTAFRLQSGVPSRFSGSGSGTD |
| | FTLTISSLQPEDFATYFCQQGSSFPLTFGGGTTVD |
| | IR |
| 1170 | DIQMTQSPSSLSASVGDSVTVTCRASQDIGNWLAW |
| | YQLKPEKAPRSLIFAASILRSGVPSRFSGSGSGTE |
| | FTLTISSLQPEDFGVFYCQQYDSSPITFGQGTRLE |
| | IK |
| 1171 | SSQLTQDPAVSVALGQTVRITCQGDSLETYYATWY |
| | QQKPGQAPLLVIYGKNSRPSGIPDRFSGSSSGNTA |
| | SLTITGAQAEDEADYYCNSRDSSGQLHVVVFGGGT |
| | KLTVL |
| 1172 | SSELTQDPAVSVALGQTVRITCQGDSLRTSYASWY |
| | QQKPGQAPMLVIYEKNNRPSGVPDRFSGSTSFNTA |
| | SLTITGAQAEDEAEYYCNSRDNNDDLPLFGGGTRL |
| | TVL |
| 1173 | QSALTQPPSASGSPGQSVTISCTGTSSDVGGYNYV |
| | SWYQQHPGKAPKLMIYEVSKRPSGVPDRFSGSKSG |
| | NTASLTVSGLQAEDEADYYCSSYAGSNNLGVFGTG |
| | TKVTVL |
| 1174 | QSVLTQPPSVSGAPGQRVTISCTGSSSNIGAGYDV |
| | HWYQQLPGTAPKLLIYGNSNRPSGVPDRFSGSKSG |
| | TSASLAITGLQAEDEADYYCQSYDSSLSGVVFGGG |
| | TKLTVL |
| 1175 | DIVMTQSPDSLAVSLGERATINCKSSQSVLYSSNN |
| | KNYLAWYQQKPGQPPKLLIYWASTRESGVPDRFSG |
| | SGSGTDFTLTISSLQAEDVAVYYCQQYYSTPFTFG |
| | PGTKVDIK |
| 1176 | DVVMTQSPLSLPVTLGQPASISCRSSQSLVHSDGN |
| | TYLNWFQQRPGQSPRRLIYKVSNRDSGVPDRFSGS |
| | GSGTDFTLKISRVEAEDVGVYYCMQGTHWPITFGQ |
| | GTRLEIK |
| 1177 | QSALTQPASVSGSPGQSITISCTGTSSDVGGYNYV |
| | SWYQQHPGKAPKLMIYDVSKRPSGVSNRFSGSKSG |
| | NTASLTISGLQAEDEADYYCSSYTSSSTLVVFGGG |
| | TKLTVL |
| 1178 | DIQMTQSPSSLSASVGDRVTITCRASQSISSYLNW |
| | YQQKPGKAPKLLIYAASSLQSGVPSRFSGSGSGTD |
| | FTLTISSLQPEDFATYYCQQSYSTPYTFGQGTKLE |
| | IK |
| 1179 | QSALTQPRSVSGSPGQSVTISCTGTSSDVGGYNYV |
| | SWYQQHPGKAPKLMIYDVSKRPSGVPDRFSGSKSG |
| | NTASLTISGLQAEDEADYYCCSYAGSYVVFGGGTK |
| | LTVL |
| 1180 | DIQMTQSPSSLSASVGDRVTITCRASQSISSYLNW |
| | YQQKPGKAPKLLIYAASSLQSGVPSRFSGSGSGTD |
| | FTLTISSLQPEDFATYYCQQSYSTLHTFGQGTKVE |
| | IK |
| 1181 | SSELTQDPAVSVALGQTVRITCQGDSLRSYYASWY |
| | QQKPGQAPVLVIYGKNNRPSGIPDRFSGSSSGNTA |
| | SLTITGAQAEDEADYYCNSRDSSGNHLVFGGGTKL |
| | TVL |
| 1182 | SYELTQPPSVSVSPGQTATITCSGDELGDTDIAWY |
| | QQKPGQSPVLVILQDTKRPSGIPERFSGSNSGTTA |
| | TLTIGGTQAMDEAEYYCQAWDTITHEEVFGGGTKL |
| | TVL |
| 1183 | DIQMTQSPSTLSASVGDRVTITCRASQSISSWLAW |
| | YQQKPGKAPKLLIYKASSLESGVPSRFSGSGSGTE |
| | FTLTISSLQPDDFATYYCQQYNYYPVAFGQGTKVE |
| | IK |
| 1184 | DIVMTQTPLSSPVTLGQPASISCRSSQSLVHSDGN |
| | TYLSWLQQRPGQPPRLLIYKISNRFSGVPDRFSGS |
| | GAGTDFTLKISRVEAEDVGVYYCTQATQFPLTFGG |
| | GTKVEIK |
| 1185 | DIQMTQSPSSLSASVGDRVTITCRASQSISSYLNW |
| | YQQKPGKAPKLLIYAASSLQSGVPSRFSGSGSGTD |
| | FTLTISSLQPEDLATYYCQQSYSTPPYTFGQGTKL |
| | EIK |
| 1186 | QSVLTQPPSVSGAPGQRVTISCTGSSSNIGAGYDV |
| | HWYQQLPGIAPKLLIYGNNNRPSGVPDRFSGSKSG |
| | TSASLAITGLQAEDEADYYCQSYDSSLSSPVVFGG |
| | GTKLTVL |
| 1187 | QSVLTQPPSASGTPGQRVTISCSGSSSNIGSNYVY |
| | WYQQLPGTAPKLLIYRNNQRPSGVPDRFSGSKSGT |
| | SASLAISGLRSEDEADYYCAAWDDSLSGPVFGGGT |
| | KLTVL |
| 1188 | SSELTQDPAVSVALGQTVRITCQGDSLRSYYASWY |
| | QQKPGQAPVLVIYGKNNRPSGIPDRFSGSSSGNTA |
| | SLTITGAQAEDEADYYCNSRDSSGNHLVFGGGTKL |
| | TVL |
| 1189 | DIQMTQSPSSLSASVGDRVTITCQASQDISNYLNW |
| | YQQKPGKAPKLLIYDASNLETGVPSRFSGSGSGTD |
| | FTFTISSLQPEDIATYYCQQYDNLPYTFGQGTKLE |
| | IK |
| 1190 | QSVLTQPPSVSAAPGQKVTISCSGSSSNIGNNYVS |
| | WYQQLPGTAPKLLIYDNNKRPSGIPDRFSGSKSGT |
| | SATLGITGLQTGDEADYYCGTWDSSLSAGVFGGGT |
| | KLTVL |
| 1191 | EIVMTQSPATLSVSPGERATLSCRASQSVSSNLAW |
| | YQQKPGQAPRLLIYGASTRATGIPARFSGSGSGTE |
| | FTLTISSLQSEDFAVYYCQQYNNWPPWTFGQGTKV |
| | EIK |
| 1192 | SYELTQPPSVSVSPGQTASITCSGDKLGDKYACWY |
| | QQKPGQSPVLVIYQDSKRPSGIPERFSGSNSGNTA |
| | TLTISGTQAMDEADYYCQAWDSSTYVVFGGGTKLT |
| | VL |
| 1193 | DIQMTQSPSSLSASEGDRVTITCRASQSISTNYLN |
| | WYQQKSGRAPTLLIYATSTLQSGVPSRFSGSGSGT |
| | DFTLTISSLQPEDFATYYCQQSYSSPPTFGGGTTV |
| | DVK |
| 1194 | DIQMTQSPSSVYASEGDRVTITCRASHSISTNYLN |
| | WYQQNSGKAPKLLIYATSSLQSGVPFRFSGSGSGT |
| | DFTLTISSLQPEDFATYYCQQSYSSPPTFGGGTKV |
| | EIK |
| 1195 | DIQMTQSPSSLSASEGDRVTISCRASQTISTNYLN |
| | WYQQKSGKAPRLLIYATSTLESGVPSRFSGSGSGT |
| | DFTLTINTLQPDDFATYYCQQSYSSPPTFGGGTKV |
| | DIK |
| 1196 | EIVLTQSPATLSLSPGERAALSCRASQTINSGYLA |
| | WYQQKPGQAPRLLIYAASHRATGIPNRFSGSGSAT |
| | DFTLTITRLEPEDVAVYYCHHYGTSPPFTFGPGTK |
| | VDIK |
| 1197 | EIVLTQSPGTLSLSPGERATLSCRASQSVSSSYLA |
| | WYQQKPGQAPRLLIYGASSRATGIPDRFSGSGSGT |
| | DFTLTISRLEPEDFAVYYCQQYGSSPLTFGGGTKV |
| | EIK |
| 1198 | SYELTQPPSVSVSPGQTARITCSGDALPKQYAYWY |
| | QQKPGQAPVLVIYKDSERPSGIPERFSGSSSGTTV |
| | TLTISGVQAEDEADYYCQSADSSGTYYVFGTGTKV |
| | TVL |
| 1199 | DIQMTQSPSSLSASVGDRVTITCRASQSISSYLNW |
| | YQQKPGKAPKLLIYAASSLQSGVPSRFSGSGSGTD |
| | FTLTISSLQPEDFATYYCQQSYSTPRTFGQGTKVE |
| | IK |
| 1200 | SYELTQPPSVSVSPGQTASISCSGDKLGDTYASWY |
| | QQKPGQSPVLVMYQDNKRPSGIPERFSGSNSGNTA |
| | TLTISGTQAMDEADYYCQAWDSSTVVFGGGTKLTV |
| | L |
| 1201 | DIVMTQTPLSLSVTPGQPASISCKSSQSLLHSDGK |
| | TYLYWYLQKPGQSPQLLIYEVSNRFSGVPDRFSGS |
| | GSGTDFTLKISRVEAEDVGVYYCMQSIQLPLTFGG |
| | GTKVEIK |
| 1202 | DIVMTQTPLSLSVTPGQPASISCKSSQSLLHSDGK |
| | TYLYWYLQKPGQSPQLLIYEVSNRFSGVPDRFSGS |
| | GSGTDFTLKISRVEAEDVGVYYCMQSIQLPFTFGQ |
| | GTRLEIK |
| 1203 | DIVMTQSPLSLPVTPGEPASISCRSSQSLLHSNGY |
| | NYLDWYLQKPGQSPQLLIYLGSNRASGVPDRFSGS |
| | GSGTDFTLKISRVEAEDVGVYYCMQALQTYTFGQG |
| | TKLEIK |
| 1204 | SYELTQPPSVSVSPGQTARITCSGDALPKKYAYWY |
| | QQKSGQAPVLVIYEDSKRPSGIPERFSGSSSGTMA |
| | TLTISGAQVEDEADYYCYSTDSSGNHRRVFGGGTK |
| | LTVL |
| 1205 | QSALTQPASVSGSPGQSITISCTGTSSDVGGYNYV |
| | SWYQQHPGKAPKLMIYDVSKWPSGVSNRFSGSKSG |
| | NTASLTISGLQAEDEADYYCSSYTSSSTLVFGGGT |
| | KLTVL |
| 1206 | SYELTQPPSVSVSPGQTARITCSGDALPKKYAYWY |
| | QQKSGQAPVLVIYEDSKRPSGIPERFSGSSSGTMA |
| | TLTISGAQVEDEADYYCYSTDSSGNHRGVFGGGTK |
| | LTVL |
| 1207 | DIQMTQSPDTLSASVGDRVTITCRASESISNWLAW |
| | YQKKVGQAPNLLIDKASNLHRGVPSRFSGSGSGTE |
| | FTLTITSLQPDDSASYYCQQYNSFPYTFGQGTTLE |
| | IK |
| 1208 | EIVLTQSPATLSLSPGERATLSCRASQSVSSYLAW |
| | YQQKPGQAPRLLIYDASNRATGIPARFSGSGSGTD |
| | FTLTISSLEPEDFAVYYCQQRSNWPVTFGQGTKVE |
| | IK |
| 1209 | DIQMTQSPSSLSASVGDRVTITCRASQGIRNDLGW |
| | YQQKPGKAPKRLIYAASSLQSGVPSRFSGSGSGTE |
| | FTLTISSLQPEDFATYYCLQHNSYPLTFGGGTKVE |
| | IK |
| 1210 | DIQMTQSPSSLSASVGDRVTITCRASQGIGNDLGW |
| | FQQKPGKAPKRLIYGASNLQSGVPSRFSGSGSGTE |
| | FTLTISSLQPEDFATYYCLQHNSYPFTFGGGTKVE |
| | IK |
| 1211 | ETVLTQSPGTLSLSPGERATLSCRASQSVSGSYLA |
| | WYQQKPGQAPRLLIYGASRRATGIADRFSGSGSGT |
| | DFTLTISRLEPEDFAVYYCQQYGTSAGTFGQGTKV |
| | EIK |
| 1212 | EIVLTQSPGTLSLSPGERGTLSCRASQSVSSSYLA |
| | WYQQKPGQAPRLLIYGASTRATGIPDRFSGSGSGT |
| | DFTLTISRLEPEDFAVYYCQQYGNLPPFTFGPGTK |
| | VDIK |
| 1213 | DIVVTQSPDSLAVSLGERATINCKSSQSLLYNFNN |
| | ENYLGWYQQKPGQPPKLLIYWASTRESGVPDRFNG |
| | SGSGTDFTLTISSLQAEDVAVYYCQQYYSTPLTFG |
| | GGTKVEIK |
| 1214 | GIVMTQSPLSLSVTPGQPASISCKSSQSLLDSDGK |
| | TYMCWYLQKPGQPPQLLIYEVSNRFSGVPERFSGS |
| | GSGTDFTLKISRVETEDVGVYYCMQNRHLYTFGQG |
| | TKLEIK |
| 1215 | GIVMTQSPLSLSVTPGQPASISCKSSQSLLDSDGK |
| | TYMCWYLQKPGQPPQLLIYEVSNRFSGVPERFSGS |
| | GSGTDFTLKISRVEAEDVGVYYCMQNRHLYTFGQG |
| | TKLEIK |
| 1216 | NIVMTQSPLSLPVTPGEPASISCRSSQSLLHSNGY |
| | NYLDWYLQKPGQSPQLLIYLGSNRASGVPDRFSGS |
| | GSGTDFTLKISRVEAEDVGVYYCMQTLQTSITFGQ |
| | GTRLEIK |
| 1217 | EIVLTQSPGTLSLSPGERATLSCRASQSVSTYLAW |
| | YQQRPGQAPRLLIYGSSSRAAGIPDRFSGSGSGTD |
| | FTLTISRLEPEDFAVYYCQQYGSSQYSFGQGTKLE |
| | IK |
| 1218 | EIVLTQSPGTLSLSPGERATLSCRASQSVSSYLAW |
| | YQQRPGQAPRLLIYGASSRAAGIPDRFSGSGSGTD |
| | FTLTISRLEPEDFAVYYCQQYGSSQYTFGQGTKLE |
| | IK |
| 1219 | DIQMTQSPSSLSASVGDRVTITCQASQDSSKYLNW |
| | YQQKPGKAPKLLIYDASTLETGVPSRFSGSGSGTD |
| | FTFTISGLQPEDVATYYCQHYDTLLTFGPGTKVEI |
| | K |
| 1220 | DIVMTQSPDSLAVSLGERATINCKSSQSVSFTSNN |
| | KNYLAWYQQKPGQPPKLLIYWASTRESGVPDRFSG |
| | SGSGTDFTLTISSLQAEDVALYLCQQYFDTPWTFG |
| | QGTKVEIK |
| 1221 | GIVMTQSPLSLSVTPGQPASISCKSSQSLLDSDGK |
| | TYLCWYLQKPGQPPQLLIYEVSNRFSGVPERFSGS |
| | GSGTDFTLKISRVEAEDVGVYYCMQNRQLYTFGQG |
| | TKLEIK |
| 1222 | DIQMTQSPSSLSASVGDRVTITCQASQDISTYLNW |
| | YQQKPGKAPKLLIYDASNLETGVPSRFSGSGSGTD |
| | FTFTISSLQPEDIATYYCQQFDNLPPFTFGPGTRV |
| | HIT |
| 1223 | DIQMTQSPSSLSASVGDRVTITCRASQSISNYLNW |
| | YQQKPGRAPKVLIYGASTLQSGVPSRFSGSGSGTD |
| | FTLTISSLQPEDFATYYCQQSYSARMSTFGQGTKL |
| | EIK |
| 1224 | DVVMTQSPLSLPVTLGQPASISCRSSQSVVHSDGK |
| | TYLNWYHQRPGQSPRRLIYEVSNRDSGVPDRFSGS |
| | GSGTDFTLKISRVEAEDVGVYYCMQGTQWPWTFGQ |
| | GTKVEIK |
| 1225 | EIVLTQSPGTLSLSPGERATLSCRASHTISSSYLA |
| | WYQQKAGQAPRLLIYAASSRATGIPARFSGSGSGT |
| | DFTLTISRLEPEDFAVYYCQQFDNSPPWTFGRGTK |
| | VEMR |
| 1226 | SYELTQPPSVSVSPGQTARITCSGDALPKQYAYWY |
| | QQKPGQAPVLVIYKDSERPSGIPERFSGSSSGTTV |
| | TLTISGVQAEDEADYYCQSADSSGTYVVFGGGTKL |
| | TVL |
| 1227 | QSALTQPRSVSGSPGQSVTISCTGTSSDVGGYNYV |
| | SWYQQHPGKAPKLMIYDVSKRPSGVPDRFSGSKSG |
| | NTASLTISGLQAEDEADYYCCSYAGSYTLVFGGGT |
| | KLTVL |
| 1228 | DIQMTQSPSSLSASVGDRVTITCRASQSISNYLNW |
| | YQQKPGKAPKLLIYAASGLQSGVPSRFSGSGSGTD |
| | FTLTISSLQPEDFATYYCQQSYSTPFTFGPGTKVD |
| | IK |
| 1229 | DVVMTQSPLSLPVTLGQPASISCRSSQSLVYSDGN |
| | TYLNWFQQRPGQSPRRLIYKVSNRDSGVPDRFSGS |
| | GSGTDFTLKISRVEAEDVGVYYCMQGTHSYTFGQG |
| | TKLEIK |
| 1230 | SYELTQPPSVSVSPGQTASITCSGDKLGDKYACWY |
| | QQKPGQSPVLVIYQDSKRPSGIPERFSGSNSGNTA |
| | TLTISGTQAMDEADYYCQAWDSSTASYVFGTGTKV |
| | TVL |
| 1231 | QSALTQPASVSGSPGQAITISCTGTSSDVGGHDYV |
| | SWYQQHPGKVPKLVVYDVTNRPSGVSNRFSGSKSG |
| | NTASLTISGLQAEDEADYYCSSYTSASTVVFGGGT |
| | KLTVL |
| 1232 | QSALTQPASVSGSPGQAITISCTGTSSDVGGHDYV |
| | SWYQQHPGKVPKLVVYDVTNRPSGISNRFSGSKSG |
| | NTASLTISGLQAEDEADYYCSSYTSASTVVFGGGT |
| | KLTVL |
| 1233 | DVVMTQSPLSLPVTLGQPASISCRSSQSLVYSDGN |
| | TYLNWFQQRPGQSPRRLIYKVSNRDSGVPDRFSGS |
| | GSGTDFTLKISRVEAEDVGVYYCMQGTHSPWTFGQ |
| | GTKVEIK |
| 1234 | QSVLTQPPSVSAAPGQKVTISCSGSSSNIGNNYVS |
| | WYQQLPGTAPKLLIYDNNKRPSGIPDRFSGSKSGT |
| | SATLGITGLQTGDEADYHCGTWDSSLSAWVFGGGT |
| | KLTVL |
| 1235 | SYELTQPPSVSVSPGQTASITCSGDALPKQYGYWY |
| | QQKPGQAPVMVIYKDNERPSGIPERFSGSSSGTTV |
| | TLTISGAQAEDEADYYCQSADGRGDWVFGGGTKLT |
| | VL |
| 1236 | EIVLTQSPGTLSLSPGERATLSCRASQSVSTYLAW |
| | YQQRPGQAPRLLIYGSSSRAAGIPDRFSGSGSGTD |
| | FTLTISRLEPEDFAVYFCQQYGSSQYSFGQGTKLD |
| | IK |
| 1237 | DIQMTQSPSTLSASIGDRVTITCRASQSISSWLAW |
| | YQQKPGKAPKLLIYETSSLEPGVPSRFSGSGSGTE |
| | FTLTISSLQPDDFATYYCQQYDSYSGTFGQGTKVE |
| | IK |
| 1238 | QPVLTQSSSASASLGSSVKLTCTLSVGHDYFTIAW |
| | HQQQPGKAPRFLMKLEGSGSYYKGSGVPDRFSGSS |
| | SGADRYLIISNLQSEDEADYFCETWDSPYVVFGGG |
| | TKLTVL |
| 1239 | DIQMTQYPSSLSASVGDTVTITCQASQDSNTYLNW |
| | YQQKPGKAPKLLIYDASNLETGVPSRFSGSGSGTD |
| | FTFTISGLQPEDIATYYCQHYDSLLTFGPGTKVDI |
| | K |
| 1240 | QSALTQPASVSGSPGQSITISCNGTNSDVGGYNYV |
| | SWYQQHPGKAPKLMIYDVSKRPSGVSNRFSGSKSG |
| | NTASLTISGLQAEDDADYYCSSYTSSSTVVFGGGT |
| | KLTVL |
| 1241 | DIVMTQSPLSLPVTPGEPASISCRSSQSLLHSNGY |
| | NYLDWYLQKPGQSPQLLIYLGSNRASGVPDRFSGS |
| | GSGTDFTLKISRVEAEDVGVYYCMQALQTLTFGPG |
| | TKVDIK |
| 1242 | DIQMTQSPSTLSASVGDRVTITCRASQSISSWLAW |
| | YQQKPGKAPKLLIYKASSLESGVPSRFSGSGSGTE |
| | FTLTISSLQPDDFATYYCQQYNSYPLFTFGPGTKV |
| | DIK |
| 1243 | DVVLTQSPLSLPVTLGQPASISCRSSQSLIYSDGN |
| | TYLNWFQQRPGQSPRRLIYKVSNRDSGVPDRFSGS |
| | GSGTDFTLRISRVEAEDVGVYYCMQGTHWPMTFGQ |
| | GTKVEIK |
| 1244 | EIVLTQSPGTLSLSPGERATLSCRASQSVSSSYLA |
| | WYQQKPGQAPRLLIYGASSRATGIPDRFSGSGSGT |
| | DFTLTISRLEPEDFAVYYCQQYGSSPMYTFGQGTK |
| | LEIK |
| 1245 | DIQMTQSPSSVSASVGDRVTITCRASQGISSWLAW |
| | YQQKPGKAPKLLIYAASSLQSGVPSRFSGSGSGTD |
| | FTLTISSLQPEDFATYYCQQANSFPAFGGGTKVEI |
| | K |
| 1246 | SYEVTQSPSVSVSPGQTASITCSGDKLGDKYACWY |
| | QQRPGQSPVLVIYQDSKRPSGIPERFSGSNSGNTA |
| | TLTISGTQAMDEADYYCQAWDSHTVVFGGGTKLTV |
| | L |
| 1247 | DIQMTQSPSTLSASVGDRVTITCRASQSISTWLAW |
| | YQQRPGKAPKLLIYKASSLESGVPSRFSGSGSGTE |
| | FTLTISSLQPDDFATYYCQQYNSYSWTFGQGTKVE |
| | IK |
| 1248 | ETMMTQSPVALSVSPGDRATLSCEASQYVGDNLAW |
| | YQQKPGQAPRLLIYGAFTRATGVPARFSASGSGAG |
| | FTLTISSLQSEDFAVYYCQQYTSWPLTFGGGTKVE |
| | IK |
| 1249 | ETMMTQSPVALSVSPGDRATLSCKASQYIGDNLAW |
| | YQQKPGQTPRLLIYGASTRATGVPARFSASGSGAG |
| | FTLTISSLQSEDFAVYYCQQYTSWPLTFGGGTKVE |
| | IK |
| 1250 | SYELTQPPSVSVSPGQTARITCSGDALPKKYAYWY |
| | QQKSGQAPVLVIYEDSKRPSGIPERFSGSSSGTMA |
| | TLTISGAQVEDEADYYCYSPKVFGGGTKLTVL |
| 1251 | DIQMTQSPSSLSASVGDRVTVACQASQDVSIYLNW |
| | YQQKPGRAPKLLIYDAYNLQTGVPSRFSGSGSGTH |
| | FTLTISSLQPEDVATYHCQQYNILPHTFGGGTKVE |
| | LT |
| 1252 | DIVMTQSPDSLAVSLGERATIKCKSSQSVYDSSNS |
| | KNYLAWFQQKPGQPPQLLIFWASTRESGVPDRFSG |
| | SGSGTDFTLTISSLQAEDVAVYYCQQYYNAPLSFG |
| | GGTKVEIK |
| 1253 | DIVMTQSPDSLPVSLGERATIKCKSSQSVYDTSNS |
| | KNYLAWFQQKPGQPPQLLIFWASTRESGVPDRFSG |
| | SGSGTDFTLTISSLQAEDVAVYYCQQYYNAPLSFG |
| | GGTKVEIK |
| 1254 | EIVLTQSPATLSLSPGERATLSCRASQSVSTYLAW |
| | YQQKPGQAPRLLIYDASNRATGIPARFSGSGSGTD |
| | FTLTISSLEPEDFAVYYCQQRSNWITFGQGTRLEI |
| | K |
| 1255 | EIVLTQSPATLSLSPGERATLSCRASQSVSSYLAW |
| | YQQKPGQAPRLLIYDASNRATGIPARFSGSGSGTD |
| | FTLTISSLEPEDFAVYYCQQRSNWITFGQGTRLEI |
| | K |
| 1256 | QSVLTQPPSASGTPGQGVTISCSGGSSNIGAYTVS |
| | WYQQLPGTAPKLLIYSTDQRPSGVPDRFSGSKSGT |
| | SASLAVTGLQSEDEADYYCAAWDDSLNGPVFGGGT |
| | KLTVL |
| 1257 | EIVLTQSPGTLSLSPGERATLSCRASQSVSSIYLA |
| | WYQQKPGQAPRLLIYGASSRATGIPDRFSGSGSGT |
| | DFTLTISRLEPEDFAVYYCQQYGSSPQTFGQGTKL |
| | EIK |
| 1258 | EIVMTQSPATLSVSPGERATLSCRASQSVTSYLAW |
| | YQQKPGQAPRLLIYGASTRATGIPARFSGSGSGTE |
| | FTLTISSLQSEDFAVYYCQQYNNWPPLTFGGGTKV |
| | EIK |
| 1259 | DIQMTQSPSTLSASVGDRVTITCRASQSITNWLAW |
| | YQQRPGKAPKLLLSKASSLESGVPSRFSGSGSGTD |
| | FTLTISSLQPDDFATYYCQQYYSYSLTFGGGTKVE |
| | SK |
| 1260 | QSALTQPASVSGSPGQSITISCTGTSSDVGSYNLV |
| | SWYQQHPGKAPKLMIYEVSKRPSGVSNRFSGSKSG |
| | NTASLTISGLQAEDEADYYCCSYAGSSTFYVFGTG |
| | TKVTVL |
| 1261 | SYELTQPPSVSVSPGQTARITCSGDALPKQYAYWY |
| | QQKTGQAPVLVIYKDSERPSGIPERVSGSSSGTTV |
| | TLTISGVQAEDEADYYCQSADSSGTWVFGGGTKLT |
| | VL |
| 1262 | EIVLTQSPGTLSLSPGERATLSCRASQSVSSRYLA |
| | WYQQKPGQAPRLLIYGASRRATGIPDRFSGSGSGT |
| | DFTLTISRLEPEDFAVYYCQQYGSSPEMYTFGQGT |
| | KLEIK |
| 1263 | EIVLTQSPGTLSLSPGERATLSCRASQSVSSSYLA |
| | WYQQKPGQAPRLLIYGASSRATGIPDRFSGSGSGT |
| | DFTLTISRLEPEDFAVYYCHQYGSGLGTFGPGTKV |
| | DIK |
| 1264 | DIVMTQTPLSLSVTPGQPASISCKSSQSLLDSDGK |
| | TYLYWYLQKPGQTPQLLIYEVSDRFSGVPDRFSGS |
| | GSGTDFTLKISRVEAEDVGVYYCMQSIQLRTFGQG |
| | TKVEIK |
| 1265 | EIVLTQSPATLSLSPGERATLSCRASQRVGSSLAW |
| | YQQKPGQAPRLLIYGASNRATGIPARFSGSGSGTD |
| | FTLTITRLEPEDFAVYYCQQCSSWPLSLTFGGGTK |
| | VEIR |
| 1266 | EIVMTQSPATLSVSPGERATLSCRASQSVSSNLAW |
| | YQQKPGQAPRLLIYGASTRATGIPARFSGSGSGTE |
| | FTLTISSLQSEDFAVYYCQQYNNWPPITFGQGTRL |
| | DIK |
| 1267 | DIQMTQSPSSVSASVGDRVTITCRASQGIRFWLAW |
| | YQQKPGKAPKLLIYAASTLQSGVPSRFSGSGSGTD |
| | FTLTISSLQPEDFATYYCQQSNSFPPTFGGGTKVE |
| | IK |
| 1268 | QSVLTQPPSVSGAPGQRVTISCTGSSSNIGAGYDV |
| | HWYQQLPGTAPKLLIYGNTNRPSGVPDRFSGSKSG |
| | TSPSLAITGLQAEDEAGYYCQSYDISLSAYVFGGG |
| | TKLTVL |
| 1269 | DIQMTQSPSTLSASVGDRVTITCRASQSISSWLAW |
| | YQQKPGKAPKLLIYDASSLESGVPSRFSGSGSGTE |
| | FTLTISSLLPADFATYYCQQYNTYSLTFGQGTRLE |
| | IK |
| 1270 | AIQLTQSPSSLSASVGDRVTITCRASQGISSYLAW |
| | YQQKPGKAPKLLIYAASTLQSGVPSRFSGSGSGTD |
| | FTLTISSLQPEDFATYYCQQLNSYPPAFGGGTKVE |
| | IK |
| 1271 | EIVMTQSPDSLAVSLGERATINCKSSQSVLYSASN |
| | KNYLAWYQQKQGQSPKLLIYWASTRESGVPDRFSG |
| | SGSGTDFTLTINGLQAEDVAVYYCQQYYRTPLTFG |
| | GGTKVEIK |
| 1272 | DIQMTQSPSAMSASVGDRVTITCRASQDISNYLAW |
| | FQQRPGKVPKRLIYAASSLQSGVPSRFSGTGSGTE |
| | FTLTISSLQPEDFATYYCLQHHTYPLTFGGGTKVE |
| | IR |
| 1273 | EIVLTQTPLSLSVTPGQPASISCKSSHSLLHSDGK |
| | TYVYWYLQRPGQPPQLLIYELFNRFSGVPDRFSGS |
| | GSGTDFTLKISRVEAEDVGTYYCMQSIQLWSFGQG |
| | TKVEIK |
| 1274 | QAVVTQEPSLTVSPGGTVTLTCGSSTGAVTSGHYP |
| | YWFQQKPGQAPRTLIYDTNNKHSWTPARFSGSLLG |
| | GKAALTLSGAQPEDEAEYYCLLSYSGPWVFGGGTK |
| | LTVL |
| 1275 | QSALTQPPSASGSPGQSVTISCTGTSSDVGGYNYV |
| | SWYQQHPGKAPKLMIYEVSKRPSGVPDRFSGSKSG |
| | NTASLTVSGLQAEDEADYYCSSYAGSNNYVFGTGT |
| | KVTVL |
| 1276 | DIQMTQSPSSLSASVGDRVTITCQASQDISNYLNW |
| | YQQKPGKAPKLLIYDASNLETGVPSRFSGSGSGTD |
| | FTFTISSLQPEDIATYYCQQYDNLPSFTFGPGTKV |
| | DIK |
| 1277 | QSALTQPRSVSGSPGQSVTISCTGTSSDVGGYNYV |
| | SWYQQHPGKAPKLMIYDVNKRPSGVPDRFSGSKSG |
| | NTASLTISGLQAEDEADYYCCSYAGSYTLVFGGGT |
| | KLSVL |
| 1278 | QSALTQPASVSGSPGQSITISCTGTSSDVGSYNLV |
| | SWYQQHPGKAPKLMIYEVSKRPSGVSNRFSGSKSG |
| | NTASLTISGLQAEDEADYYCCSYAGSSTVVFGGGT |
| | KLTVL |
| 1279 | DIQMTQSPSSLSASVGDRVTISCRASQSIGKYLNW |
| | YQQKPGKAPKLLIYAASSLQSGVPSRFSGSGSGTD |
| | FTLTINNLQPEDFATYYCQQSYNVPPWTFGQGTKV |
| | EIK |
| 1280 | DVVMTQSPVSLTVTLGQPASISCRPSQSIEHSDGN |
| | IYLNWFQQRPGQSPRRLIYKISNRDSGVPDRISGS |
| | GSGTDFTLKISRVEAEDVGVYYCMQGTHWPWTFGQ |
| | GTKVEIK |
| 1281 | QSVLTQPPSVSGAPGQRVIIPCTGSSSNTGAGYDV |
| | HWYQQLPGTAPKLVIYDNSHRPSGVPDRFSGSKSG |
| | TSASLAITGLQAEDEADYYCQSYDINLSAVFGGGT |
| | KLTVL |
| 1282 | EIVLTQSPGTLSLSPGERATLSCRATQSLTSSSLA |
| | WYQQKPGQAPRLLIYGASSRATGIPDRFSGSGSGT |
| | DFTLTISRLKPEDFAVYYCHQYHNSPWTFGQGTKV |
| | EIK |
| 1283 | DFVMTQSPLSLPVTPGEPASISCRSSQSLLHGNGY |
| | TYLDWYLQKPGQSPQLLIYLGSTRASGVPDRFSGS |
| | GSGTDFTLKISRVEAEDVGVYYCMQALQTPYTFGQ |
| | GTKLEIK |
| 1284 | SYVLTQPPSVSVAPGKTARITCGGNNIGSKSVHWY |
| | QQKPGQAPVLVVYDDSDRPSGIPERFSGSNSGNTA |
| | TLTISRVEAGDEADYYCQVWDSSSDHYVFGTGTKV |
| | TVL |
| 1285 | EIVLTQSPGTLSLSPGERATLSCRASQSVSSSYLA |
| | WYQQKPGQAPRLLIYGASSRATGIPDRFSGSGSGT |
| | DFTLTISRLEPEDFAVYYCQQYGSSPRTFGQGTKV |
| | EIK |
| 1286 | QIVMTQSPATLSVSPGGGATLSCRASQSVSSKVAW |
| | YQQKPGQAPRLLIYGASTRATGIPARFSGSGSGTE |
| | FTLTISSLQSEDSAVYYCQQYDNWLPYTFGQGTKL |
| | EIK |
| 1287 | QAVVTQEPSLTVSPGGTVTLTCGSSTGAVTSGHYP |
| | YWFQQKPGQAPRTLIYDTSNKHSWTPARFSGSLLG |
| | GKAALTLSGAQPEDEAEYYCLLSYSGAYVLFGGGT |
| | KLTVL |
| 1288 | EIVMTQSPAILSVSPGERATLSCRASQSVTRNLAW |
| | YQQKPGQAPRLLIYGASTRATNIPARFSGSGFGTE |
| | FTLIISSLQSEDFAVYYCQQYSNWPLYTFGQGTKL |
| | EIK |
| 1289 | QSVLTQPPSASGTPGQRVTISCSGSSSNIGSNTVN |
| | WYQQLPGTAPKLLIYSNNQRPSGVPDRFSGSKSGT |
| | SASLAISGLQSEDEADYYCAAWDDSLNGPYVFGTG |
| | TKVTVL |
| 1290 | QSALTQPASVSGSPGQSITISCTGTSSDVGGYNYV |
| | SWYQHHPGKAPKLMIYEVSNRPSGVSNRFSGSKSA |
| | NTASLTISGLQTEDEADYYCSSYTSISTVLFGGGT |
| | KLTVL |
| 1291 | SDALTQPPSVSVAPGKTAAITCGGDNIGSKNVHWY |
| | QQKPGQAPLLVVFDDGDRPSGIPERFSGSNSGNTA |
| | TLTISRVEAGDEADYYCQVWDGGSDDRGYVFGTGT |
| | KVTVL |
| 1292 | QSALTQPASVSGSPGQSITISCTGTSSDVGAYNYV |
| | SWYQQHPGKAPKLMIYDVTKRPSGVSNRFSGSKSG |
| | NTASLTISGLQAEDEADYYCSSFTSNGAWVFGGGT |
| | KVTVL |
| 1293 | DIQMTQSPSSLSASVGDRVTITCRASQSISNYLNW |
| | YQQKPGKAPKFLIYAASTLHTGVPSRFSGSGSGTD |
| | FTLTISSLQPEDFATYYCQQNYIRPYTFGQGTKLE |
| | IK |
| 1294 | DIQMTQSPSSLSASVGDRVTITCQASQDISNYLNW |
| | YQQKPGKAPKLLIYDASNLETGVPSRFSGSGSGTD |
| | FTFTISSLQPEDIATYYCQQYDNLPITFGGGTKVE |
| | IK |
| 1295 | QSVLTQPPSTSGAPGQRVTISCSGSSSNVALNAVS |
| | WYQQLPRMAPKLLIYRDNQRPSGVPERFSGSRSGT |
| | SASLAITGLQSDDEADYYCATWDDSLNGVFGGGTK |
| | LTVL |
| 1296 | EIVMTQSPATLSVSPGERATLSCRASQSVSSNLAW |
| | YQQKPGQAPRLLIYGASSRATGIPARFSGSGSGTE |
| | FTLTISSLQSEDFGVYYCQQYNNWPYTFGQGTKLE |
| | IK |
| 1297 | QPVLTQPPSASASLGASVTLTCTLSSGYSNYKVDW |
| | YQQRPGKGPRFVMRVGTGGIVGSKGDGIPDRFSVL |
| | GSGLNRYLTIKNIQEEDESDYHCGADHGSGSNFVY |
| | VFGTGTKVTVL |
| 1298 | QSALTQPASVSGSPGQSITISCTGTSSDVGSYNLV |
| | SWYQQHPGKAPKLMIYEVSKRPSGVSNRFSGSKSG |
| | NTASLTISGLQAEDEADYYCCSYAGSSTLVFGGGT |
| | KVTVL |
| 1299 | DIKMTQSPSTLSASVGDRVTITCRASQHINRWLAW |
| | YQQKPGKAPKLLIYEASSLKSGVPSRFSGSGSGTE |
| | FTLTITSLQLDDFATYSCQQHDSAPYTFGQGTKLE |
| | IK |
| 1300 | DIQMTQSPSTLSASLGDRVMITCRASQNISRWLAW |
| | YQQKPGKAPKFLIYKASALETGVPSRFSGSGSGTE |
| | FTLTITGLQPDDFATYYCQQYNSYVTFGGGTKVEM |
| | K |
| 1301 | DIVMTQTPLSLSVTPGQPASISCKSSQSLLHSDGK |
| | TYLYWFLLKPGQSPQFLIYEVSSRFSGVPDRFRGS |
| | GSGTDFTLKISRVEAEDVGVYYCMQGKHLRWTFGQ |
| | GTKVEIK |
| 1302 | SYELAQPPSVSVSPGQTARITCSGDALPIKYAYWY |
| | QQKSGQAPVLVISEDSKRPSGIPERFSGSSSGTMA |
| | TLTISGAQVEDEADYYCYSTDYSGNHGVFGGGTKL |
| | TVV |
| 1303 | EIVLTQSPATLSLSPGERATLSCRASQSVSTYLAW |
| | YQQKPGQAPRLLIYDASNRATGIPARFSGSGSGTD |
| | FTLTISSLEPEDFAVYYCQQCSNWPNTFGQGTKLE |
| | IK |
| 1304 | SYELTQPPSVSVSPGQTARITCSGDELPKQYSYWF |
| | QQRPGQAPVLVIYKDRERPSGIPERFSGSHSGTTV |
| | TLTISGVQAEDEADYYCQSADSNDSWVFGGGTKLT |
| | VL |
| 1305 | QSVLTQPPSVSAAPGQKVTISCSGSSSNIGNNYVS |
| | WYQQLPGTAPKLLIYDNNKRPSGIPDRFSGSKSGT |
| | SATLGITGLQTGDEADYYCGTWDSSLSAGVFGGGT |
| | KLTVL |
| 1306 | GIQLTQSPSSVSASLGDTVTITCRASQNINVFLAW |
| | YQQRPGSAPSLLIYAASNLQSGVPSRFVGSGSGTD |
| | FTLTISGLQPEDFATYYCQQGHNFPWTFGRGTKVE |
| | VK |
| 1307 | EIVLTQSPGTLSLSPGDRATLSCRASQSLNNNQLA |
| | WYQQKLGQAPRLLIYGASSRATGIPDKISGSGSGT |
| | VFTLTISRLEPEDFAVYYCQQYGSLPLTFGGGTKV |
| | EIK |
| 1308 | EIVLTQSPGTLSLSPGDRATLSCRASQSLNNNQLA |
| | WYQQKLGQAPRLLIYGASSRATGIPDKISGSGSGT |
| | VFTLTISRLEPEDFAVYYCQQYGSLPLTFGGGTKV |
| | EIK |
| 1309 | QSVLTQPPSVSGAPGQRVTISCTGSSSNIGAGYDV |
| | HWYQQLPGTAPKLLIYGNSNRPSGVPDRFSGSKSG |
| | TSASLAITGLQAEDEADYYCQSYDSSLSGWVFGGG |
| | TKLTVL |
| 1310 | EIVLTQSPATLSLSPGERATLSCRASQSISSHLGW |
| | YQQKPGQAPRLLIYDASNRAPGIPARFSGSGSGTD |
| | FTLTISSLEPEDFAVYYCQQRRNWPLTFGGGTKVE |
| | IK |
| 1311 | EIVLTQSPATLSLSPGEGATLSCRASQSVASYLAW |
| | YQQKPGQAPRLLIYDASNRATGIPARFSGSGSGTD |
| | FTLTISSLEPEDFAVYYCQHRSNWPYTFGQGTKLE |
| | IK |
| 1312 | QSVLTQPPSASGTPGQRVTISCSGSSSNIGSNTVN |
| | WYQQLPGTAPKLLIYSNNQRPSGVPDRFSGSKSGT |
| | SASLAISGLQSEDEADYYCAAWDDSLNGVVFGGGT |
| | KLTVL |
| 1313 | DIVMTQTPLSSPVILGQSASISCRSSHSLLHNNGN |
| | TYLSWLHQRPGQPPRLLIYEISNRFSGVPDRFSGS |
| | GAGTDFTLKISRVEAEDVGIYYCMQTTQFPRTFGQ |
| | GTKVEIR |
| 1314 | SYELTQPPSVSVSPGQTAKITCSGDALPKEFAYWY |
| | QQKPGQAPVLIIYKDKERPSGIPERFSGSSSGTTV |
| | TLTISGVQAEDEADYYCQSQDSSATYVVFGGGTKL |
| | TVL |
| 1315 | SSDLTQPPSVSVSPGQTASIACSGDKLGDKYVSWY |
| | QQKPRQSPVLVIYQDNKRPSGIPERFAGSNSGNTA |
| | TLTISGTQTMDEADYYCQAWDSSIEVFGTGTKVTV |
| | L |
| 1316 | EIVLTQSPGTLSLSPGERATLSCRASQSVSSSYLA |
| | WYQQKPGQAPRLLIYGASSRATGIPDRFSGSGSGT |
| | DFTLTISRLEPEDFAVYYCQQYGSSPPWTFGQGTK |
| | VEIK |
| 1317 | SYELTQPPSVSVSPGQTARITCSADALSKQYAYWY |
| | QQKPGQAPVLVIYKDSERPSGIPERFSGSNSGTTV |
| | TLTISGVQAEDEAEYYCQSGDSSGTYVVFGGGTKL |
| | TVL |
| 1318 | DIVMTQTPLSSPVILGQSASISCRSSQSLLHNNGN |
| | TYLSWLHQRPGQPPRLLIYEISNRFSGVPDRFSGS |
| | GAGTDFTLKISRVEAEDVGIYYCMQTTQFPRTFGQ |
| | GTKVEIR |
| 1319 | DIQMTQSPSAMSASVGDRVTITCRASQGIRNSLAW |
| | FQQKPGKVPKRLIYDASNLQSGVPSRFSGSGSGTE |
| | FTLTISSLQPEDFATYYCLQYNTYSYSFGQGTKLE |
| | IK |
| 1320 | DIQMTQSPSILSASVGDRVTITCRASQNISRWLAW |
| | YQQKPGKAPKFLIYKASGLESGVPSRFSGSGSGTE |
| | FTLTISSLQPDDFATYYCQQYNSYITFGGGTKIEI |
| | K |
| 1321 | DIQMTQSPSTLSASVGDRVIITCRASQNISRWLAW |
| | YQQKPGTAPKFLIYKASALESGVPSRFSGSGSGTE |
| | FTLTITSLQPDDFATYYCQQYNSYVTFGGGTKVEM |
| | K |
| 1322 | SYELTQPPSVSVSPGQTARITCSGDALPQRYAYWY |
| | QQKSGQAPVLVIYEDTKRPSGIPERFSGFSLGTLA |
| | TLTISGAQVEDEADYYCYSTDSSDNQRVFGGGTKL |
| | TVL |
| 1323 | AIQLTQSPSSLSASVGDRVTITCRASQGVASYLAW |
| | YQQKPGKAPNLLIYAASTLQGGVPSRFSGSGSGTD |
| | FTLTISNLQPEDFATYYCQHLKSYPLTFGGGTKVE |
| | IK |
| 1324 | DIQMTQSPPSVSASIGDTVTITCRATQNINVFLAW |
| | YQQKPGSAPTLLIYGASSLQSGVPSRFVGSGSGTD |
| | FTLTISGLQPEDFATYYCQQGHNFPWTFGRGTKVE |
| | VK |
| 1325 | DIQMTQSPSSVSASIGDTVTITCRATQNINVFLAW |
| | YQQKPGSAPTLLIYGASSLQSGVPSRFVGSGSGTD |
| | FTLTISGLQPEDFATYYCQQGHNFPWTFGRGTKVE |
| | VK |
| 1326 | EIVMTQSPATLSVSPGERATLSCRASQSLNSNLAW |
| | YQQKPGQAPRLVIYGASTRAAGFPARFSGSGSETE |
| | FTLTISSLQSEDFAIYFCQQYHNFPLTFGQGTEVE |
| | VR |
| 1327 | QSVLTQPPSVSGAPGQRVTISCTGSSSNIGAGYDV |
| | HWYQLLPGTAPKLLIYGNNNRPSGVPDRFSGSKSG |
| | TSASLAIIGLQAEDEATYYCQSYDSSLSVVFGGGT |
| | KVTVL |
| 1328 | SYELTQPPSVSVSPGQTAIITCSGDKLGEKYASWY |
| | QQRPGQSPMLVIYQDTKRPSGIPERFSGSNSGNTA |
| | TLTISGTQAVDEADYFCQAWDSNTGVFGTGTKVTV |
| | L |
| 1329 | QSVLTQPPSLSGAPGQRVTISCTGSSSNIGAGYDV |
| | HWYQQLPGTAPKLLIYGDSNRPSGVPDRFSGSKSG |
| | TSASLAITGLQAEDEADYYCQSYDSSLSGSVFGGG |
| | TKLTVL |
| 1330 | SYELTQPPSVSVSPGQTARISCSADALPKQNAYWY |
| | QCKPGQAPILLIYKDTERPSGIPERFSGSSSGTTV |
| | TLTISGVQPEDDADYYCQSVDNTGASPHVVFGGGT |
| | KLTVL |
| 1331 | DIQMTQSPSTLSASVGDSVTITCRANETIASWVAW |
| | YQQKPGKAPKLLIYKASSLESGVPSRFSGSESGTE |
| | FTLTISSLQPDDFATYYCQQYHTYWTFGQGTKVEV |
| | K |
| 1332 | SYELTQPPSVSVSPGQTASIACSGDKLGDKYTCWY |
| | QQKPGQSPVLVMYQDSKRPSGIPERFSGSNSGNTA |
| | TLTISGTQVMDEADYYCQAWDSGTVVFGGGTKLTV |
| | L |
| 1333 | EIVLTQSPGTLSLSPGERATLSCRASQSVSSSYLA |
| | WYQQKPGQAPRLLIYGASSRATGIPDRFSGSGSGT |
| | DFTLTISRLEPEDFAVYYCQQYGSSPRTFGQGTKV |
| | EIK |
| 1334 | EIVLTQSPGTLSLSPGERATLSCRASQSVSSSYLA |
| | WYQQKPGQAPRLLIYGASSRATGIPDRFSGSGSGT |
| | DFTLTISRLEPEDFAVYYCQQYGSSPRTFGQGTKV |
| | EIK |
| 1335 | DIVLTQSPGTLSLSPGERATLSCRASQSISSSYLA |
| | WYQQKPGQAPRLVIHGASSRATGIPDRFSGSGSGT |
| | DFTLTISRLEPEDFAVYYCQHYGTSPYTFGQGTKL |
| | EIK |
| 1336 | EIVLTQSPGTLSLSPGERATLSCRASQSVSSSYLA |
| | WYQQKPGQAPRLLIYGASSRATGIPDRFSGSGSGT |
| | DFTLTISRLEPEDFAVYYCQQYGSSTLVTFGQGTK |
| | VEIK |
| 1337 | QSALTQPASVSGSPGQSITISCTGTSSDVGSYNLV |
| | SWYQQHPGKAPKLMIYEVSKRPSGVSNRFSGSKSG |
| | NTASLTISGLQAEDEADYYCCSYAGSSLWVFGGGT |
| | KLTVL |
| 1338 | NFMLTQPHSVSESPGKTVTISCTGSSGSIASNYVQ |
| | WYQQRPGSAPTTVIYEDNQRPSGVPDRFSGSIDSS |
| | SNSASLTISGLKTEDEADYYCQSYDSSFWVFGGGT |
| | KLTVL |
| 1339 | QSVLTQPPSVSAAPGQKVTISCSGSSSNIGNNYVS |
| | WYQQLPGTAPKLLIYDNNKRPSGIPDRFSGSKSGT |
| | SATLGITGLQTGDEADYYCGTWDSSLSAVVFGGGT |
| | KLTVL |
| 1340 | SYELTQPPSVSVSPGQTARITCSGDALPEKYAYWF |
| | QQKSGQAPVLVIYEDNKRPSGIPERFSGSSSGTMA |
| | TLTISGAQVEDEADYYCYSTDRSGNHRGVFGTGTK |
| | VTVL |
| 1341 | SSELTQDPAVSVALGQTVRITCQGDSLRSYYASWY |
| | QQKPGQAPVLVIYGKNNRPSGIPDRFSGSSSGNTA |
| | SLTITGAQAEDEADYYCNSRDSSGNHLYWVFGGGT |
| | KLTVL |
| 1342 | QSVLTQPPSVSGAPGQRVTISCTGSSSNIGAGYDV |
| | HWYQQLPGTAPKLLIYGNSNRPSGVPDRFSGSKSG |
| | TSASLAITGLQAEDEADYYCQSYDSSLSGHVVFGG |
| | GTKLTVL |
| 1343 | QSVLTQPPSVSAAPGQKVTISCSGSSSNIGNNYVS |
| | WYQQLPGTAPKLLIYDNNKRPSGIPDRFSGSKSGT |
| | SATLGITGLQTGDEADYYCGTWDSSLSAGGVFGTG |
| | TKVTVL |
| 1344 | QSALTQPASVSGSPGQSITISCTGTSSDVGSYNLV |
| | SWYQQHPGKAPKLMIYEGSKRPSGVSNRFSGSKSG |
| | NTASLTISGLQAEDEADYYCCSYAGSSTFVVFGGG |
| | TKLTVL |
| 1345 | QSVLTQPPSVSAAPGQKVTISCSGSSSNIGNNYVS |
| | WYQQFPGTAPKLLIYDNNKRPSGIPDRFSGSKSGT |
| | SATLGITGLQTGDEADYYCGTWDSSLSAVVFGGGT |
| | KLTVL |
| 1346 | AIQLTQSPSSLSASVGDRVTITCRASQGISSYLAW |
| | YQQKPGKAPKLLIYAASTLQSGVPSRFSGSGSGTD |
| | FTLTISSLQPEDFATYYCQQLNSYPPTFGQGTKVE |
| | IK |
| 1347 | DIQMTQSPSSLSASVGDRVTITCRASQSIRFYLNW |
| | YQQKPGKAPKLLIYAASSLQSGVPSRFSGSGSGTD |
| | FTLTISSLQPEDFATYYCQQSYSTLWTFGQGTKVE |
| | IK |
| 1348 | EIVLTQSPGTLSLSPGERATLSCRASQSVSSTYLA |
| | WYQQKPGQAPRLLIYDASSRATGIPDRFSGGGSGT |
| | DFTLTISRLEPEDFAVYYCQQYGDSPETFGQGTKV |
| | EIK |
| 1349 | SYELTQPPSVSVSPGQTASITCSGDKLGDNYASWY |
| | QQKSGQSPVLVIYQDTKRPSGIPERFSGSNSGNTA |
| | TLTISGTQAMDEADYYCQAWDSSTVVFGGGTKLTV |
| | L |
| 1350 | DIQMTQSPSSLSASVGDRVTITCQASQDISNYLNW |
| | YQQKPGKAPKLLIYDASNLETGVPSRFSGSGSGTD |
| | FTFTISSLQPEDIATYYCQQYDNLPYTFGQGTKLE |
| | IK |
| 1351 | DIQMTQSPSSLSASVGDRVTITCQASQDISNYLNW |
| | YQQKPGKAPKLLIYDASNLETGVPSRFSGSGSGTD |
| | FTFTISSLQPEDIATYYCQQYDNLPYTFGQGTKLE |
| | IK |
| 1352 | EIVLTQSPATLSLSPGERATLSCRASQSVSSYLAW |
| | YQQKPGQAPRLLIYDASNRATGIPARFSGSGSGTD |
| | FTLTISSLEPEDFAVYYCQQRSNWPSITFGQGTRL |
| | EIK |
| 1353 | DIQMTQSPSSVSASVGDRVTITCRASQGISNWLAW |
| | YQQKPGKAPKLLIYAASSLQSGVPSRFSGSGSGTD |
| | FTLTISSLQPEDFATYYCQQANSFPLAFGGGTKVE |
| | IK |
| 1354 | DIQMTQSPSSLSASVGDRVTITCRASQSISSYLNW |
| | YQQKPGKAPKLLIYAASSLQSGVPSRFSGSGSGTD |
| | FTLTISSLQPEDFATYYCQQSYSTPFGFGPGTKVD |
| | IK |
| 1355 | QSVLTQPPSVSGAPGQRVTISCTGSRSNIGAGFDV |
| | HWYQQLPGTAPKLLIYGNSNRPSGVPDRFSGSKSG |
| | TSASLAITGLQAEDEAVYYCLSYDSSLSGSVFGGG |
| | TKLTVL |
| 1356 | AIQLTQSPSSLSASVGDRVTITCRASQGISSALAW |
| | YQQKPGKAPKVLIYDASSLESGVPPRFSGSGSGTD |
| | FTLTISSLQPEDFATYYCQQFNNYPLTFGGGTKVE |
| | IK |
| 1357 | DIQMTQSPSSLSASVGDRVTITCQASQDMSNYLNW |
| | YQQKPGKAPKLLIYDASNLETGVPSRFSGSGSGTD |
| | FTFTISSLQPEDIATYYCQQYDNLPFTFGPGTKVD |
| | IK |
| 1358 | QSALTQPASVSGSPGQSITISCTGTSSDVGGYNYV |
| | SWYQQHPGKAPKLMIYDVSNRPSGVSNRFSGSKSG |
| | NTASLTISGLQAEDEADYYCSSYTSSSAYVFGTGT |
| | KVTVL |
| 1359 | SSELTQDPAVSVALGQTVRITCQGDSLRSYSASWY |
| | QQKPGQAPVLVIYVKNNRPSGIPDRFSGSSSGNTA |
| | SLTITGAQAEDEADYYCNSRDSSGNHVVFGGGTRL |
| | TVL |
| 1360 | QSALTQPRSVSGSPGQSVTISCTGTSSDVGDYDYV |
| | SWYQHHPGKAPKLMIYDVSKRPSGVPDRFSGSKSG |
| | NTASLTISGLQAEDDADYYCCSYAGSYPVVFGGGT |
| | KLTVL |
| 1361 | QSALTQPPSASGSPGQSVTISCTGTSSDVGGYNYV |
| | SWYQQHPGKAPKLMIYEVSKRPSGVPDRFSGSKSG |
| | NTASLTVSGLQAEDEADYYCSSYAGSNKVFGGGTK |
| | LTVL |
| 1362 | EIVLTQSPGTLSLSPGERATLSCRASQSVSSSYLA |
| | WYQQKPGQAPRLLIYGASSRATGIPDRFSGSGSGT |
| | DFTLTISRLEPEDFAVYYCQQYGSSGGYTFGQGTK |
| | LEIK |
| 1363 | DIQMTQSPSSLSASVGDRVTITCRASQSISSYLNW |
| | YQQKPGKAPKLLIYAASSLQSGVPSRFSGSGSGTD |
| | FTLTISSLQPEDFATYYCQQSYSTPYTFGQGTKLE |
| | IK |
| 1364 | EIVLTQSPGTLSLSPGERATLSCRASQSVSSSYLA |
| | WYQQKPGQAPRLLIYGASSRATGIPDRFSGSGSGT |
| | DFTLTISRLEPEDFAVYYCQQYGSSSWTFGQGTKV |
| | EIK |
| 1365 | DIQMTQSPSSLSASVGDRVTITCRASQSISSYLNW |
| | YQQKPGKAPKLLIYAASSLQSGVPSRFSGSGSGTD |
| | FTLTISSLQPEDFATYYCQQSYSTPYTFGQGTKLE |
| | IK |
| 1366 | SYELTQPPSVSVSPGQTASITCSGDKLGNKYACWY |
| | QQKPGQSPVLVIYQDSKRPSGIPERFSGSNSGNTA |
| | TLTISGTQAMDEADYYCQAWDSSTANWVFGGGTKL |
| | TVL |
| 1367 | QSALTQPASVSGSPGQSITISCTATSGDVGGYNYV |
| | SWYQQHPGKAPKLMIFDVYNRPSGVSNRFSGSKSG |
| | NTASLTISGLQAEDEADYYCSSFTDSSTLVVFGGG |
| | TKLTVL |
| 1368 | DIQMTQSPSSLSASVRDKVTITCRASQSISSCLNW |
| | YQQKPGKAPKVLIYAASSLQSGVPSRFSGSGSGTD |
| | FTLTISSVQPEDFATYYCQQSYSVPHTFGQGTKVE |
| | IK |
| 1369 | EIVMTQSPATLSVSPGERATLSCRASQSVSSNLAW |
| | YQQKPGQAPRLLIYGASTRATGIPARFSGSGSGTE |
| | FTLTISSLQSEDFAVYYCQQYNNWLTFGGGTKVEI |
| | K |
| 1370 | EIVMTQSPATLSVSPGERVTLSCRASQSINRNLAW |
| | YQQKPGQAPRLLVYDASTRAPGIPTRVSGSGSGTD |
| | FTLTISSLQSEDFAVYYCQQYNNWPPITFGQGTRL |
| | EIQ |
| 1371 | EIVMTQSPATLSVSPGERVTLSCRASQSVNRNLAW |
| | YQQKPGQAPRLLVYDASTRAPGIPTRVRGSGSGTD |
| | FTLTISSLQSEDFAVYYCQQYNNWPPITFGQGTRL |
| | EIQ |
| 1372 | QTALTQPPSASGSPGQSVTISCTGSSGDVGGYNYV |
| | SWYQQYPGKAPKLILSEVSQRPSGVPDRFFGSKSG |
| | NTASLTVFGLQAEDEADYYCSSYAGTNKILFGGGT |
| | KLTVL |
| 1373 | DIQMTQSPSSLSASVGDRVTITCRASQSISSFLNW |
| | FQQKPGKAPKLLIYAASSLQGGVPSRFSGSGSGTD |
| | FTLTINSLQPEDFATYYCQQSYSTPLTFGGGTKVE |
| | IK |
| 1374 | QSALTQPASVSGSPGQSITISCTGTSSDVGGYNYV |
| | SWYQQHPGKAPKLMIYDVSKRPSGVSNRFSGSKSG |
| | NTASLTISGLQAEDEADYYCSSYTSSSTWVFGGGT |
| | KLTVL |
| 1375 | DIQMTQSPSSLSASVGDRVTITCRASQSISSYLNW |
| | YQQKPGKAPKLLIYAASSLQSGVPSRFSGSGSGTD |
| | FTLTISSLQPEDFATYYCQQSYSTPYTFGQGTKLE |
| | IK |
| 1376 | DIVMTQSPLSLPVTPGEPASISCRSSQSLLHSNGY |
| | NYLDWYLQKPGQSPQLLIYLGSNRASGVPDRFSGS |
| | GSGTDFTLKISRVEAEDVGVYYCMQALQTPGTFGQ |
| | GTRLEIK |
| 1377 | DIVMTQSPLSLPVTPGEPASISCRSSQSLLHSNGY |
| | NYLDWYLQKPGQSPQLLIYLGSNRASGVPDRFSGS |
| | GSGTDFTLKISRVEAEDVGVYYCMQALQTPGTFGQ |
| | GTRLEIK |
| 1378 | DIQMTQSPSTLSASVGDRVTITCRASQSISSWLAW |
| | YQQKPGKAPKLLIYKASSLESGVPSRFSGSGSGTE |
| | FTLTISSLQPDDFATYYCQQYNSYSAFGQGTKLEI |
| | K |
| 1379 | PYDLTQPPSVSVSPGQTATITCSGDKLGKKYACWY |
| | QQKPGQSPVLLIYQDVKRPSGIPERFSGSNSGTTA |
| | TLTISETQTMDEADYYCQAWDRTTATFGGGTRLTV |
| | L |
| 1380 | QSVLTQPPSVSGAPGQRVTISCTGSSSNIGAGYDV |
| | HWYQQLPGTAPKLLIYGNSNRPSGVPDRFSGSKSG |
| | TSASLAITGLQAEDEADYYCQSYDSSLSGWVFGGG |
| | TKLTVL |
| 1381 | QSALTQPASVSGSPGQSITISCTGTTFDVGVYDFV |
| | SWYQQLPGKAPKLIIHDDTHRPSGVSDRFSGSRSG |
| | TTASLTISGLQADDEADYYCSSYTSLNTLEVVFGG |
| | GTKLTVL |
| 1382 | DIVMTQSPLSLPVTPGEPASMSCKSTQSLLHSNGN |
| | YYVTWYLQKPGQSPHLLIYLASNRASGVPDRFSGS |
| | GSGTDFTLKISSVEAEDVGVYYCMQALQTPYSFGQ |
| | GTKLEIK |
| 1383 | SYVLTQPPSVSVAPGKTARITCGGNNIGSKSVHWY |
| | QQKPGQAPVLVIYYDSDRPSGIPERFSGSNSGNTA |
| | TLTISRVEAGDEADYYCQVWDSSSDRTVVFGGGTK |
| | LTVL |
| 1384 | QSVLTQPPSASGTPGQRVTISCSGSSSNIGNNYVY |
| | WYQHLPGTAPKLLIYRNNQRPSGVPDRFSGSKSGT |
| | SASLAISGLRSENEADYYCASWDDKVRGWVFGGGT |
| | KLTVL |
| 1385 | EIVLTQSPGTLSLSPGERATLSCRASQSVSSSYLA |
| | WYQQKPGQAPRLLIYGASSRATGIPDRFSGSGSGT |
| | DFTLTISRLEPEDFAVYYCQQYGSSPWTFGQGTKV |
| | EIK |
| 1386 | DIQMTQSPSTLSASVGDRVTITCRASQSISSWLAW |
| | YQQKPGKAPKLLIYKASSLESGVPSRFSGSGSGTE |
| | FTLTISSLQPDDFATYYCQQYNSYSRTFGQGTKVE |
| | IK |
| 1387 | DIQMTQSPSTLSASVGDRVTITCRASQSISDWLAW |
| | YQQKPGKAPKLLIYKASTLEGGVPSRFSGSESGTE |
| | FTLTISSLQPDDFATYYCQQYNTSPLTFGGGTKVE |
| | IK |
| 1388 | QSVLTQPPSVSGAPGQRVTISCTGSSSNIGAGYDV |
| | HWYQQLPGTAPKLLIYGNSNRPSGVPDRFSGSKSG |
| | TSASLAITGLQAEDEADYYCQSYDSSLSGSLFGGG |
| | TKLTVL |
| 1389 | SYELTQPPSVSVSPGQTARITCSGDALPKQYAYWY |
| | QQKPGQAPVLVIYKDSERPSGIPERFSGSSSGTTV |
| | TLTISGVQAEDEADYYCQSADSSGTYRVFGGGTKL |
| | TVL |
| 1390 | EIVLTQSPGTLSLSPGERATLSCRASQSVSSSYLA |
| | WYQQKPGQAPRLLIYGASSRATGIPDRFSGSGSGT |
| | DFTLTISRLEPEDFAVYYCQQYGRTFGQGTKVEIK |
| 1391 | QSALTQPASVAGSPGQTITISCTGPNSDINSYDYV |
| | SWYQQRPGKAPKLIIHDVDHRPSGVSDRFSGFMSD |
| | NTASLTISGLQAEDEAHYYCSSYTNIDTLEIVFGA |
| | GTKLTVL |
| 1392 | DIQMTQSPSAMSASVGDRVTITCRASQGISNYLAW |
| | FQQKPGKVPKRLIYAASSLQSGVPSRFSGSGSGTE |
| | FTLTISSLQPEDFATYYCLQHNSYPRTFGQGTKVE |
| | IK |
| 1393 | SYELTQPPSVSVAPGKAASITCGGINIGSKSVHWY |
| | QQKPGQAPVLVVYDDSDRPSGIPERFSGSNSGNTA |
| | TLTISRVESGDEADYYCQVWHSSFDPWVFGGGTKL |
| | TVL |
| 1394 | DIQMTQSPSSLSASVGDRVTITCRASQSISSYLNW |
| | YQQKPGKAPKLLIYAASSLQSGVPSRFSGSGSGTD |
| | FTLTISSLQPEDFATYYCQQSYSTPPTTFGPGTKV |
| | DIK |
| 1395 | DIQMTQSPSTLSASVGDRVTITCRASQSISSWLAW |
| | YQQKPGKAPKLLIYKASSLESGVPSRFSGSGSGTE |
| | FTLTISSLQPDDFATYYCQQYNSYFPTFGQGTKVE |
| | IK |
| 1396 | SYVLTQPPSVSVAPGKTARITCGGNNIGSKSVHWY |
| | QQKPGQAPVLVVYDDNDRPSGIPDRFSGSNSGNTA |
| | TLTISRVEAGDEADYYCQVWDSSSDHYWVFGGGTK |
| | LTVL |
| 1397 | QSVLTQPPSVSAAPGQKVTISCSGSSSNIGNNYVS |
| | WYQQLPGTAPKLLIYDNNKRPSGIPDRFSGSKSGT |
| | SATLGITGLQTGDEADYYCGTWDSSLSAGVFGGGT |
| | KLTVL |
| 1398 | QLVVTQSPSASASLGASVKLTCTLSSGHSSYVIAW |
| | HQQQPEKGPRFLMKLNSDGSHNKGDGIPDRFSGSS |
| | SGAERYLTISNLQSEDEADYYCQTWGTGPQVLFGG |
| | GTKLTVL |
| 1399 | DIQMTQSPSSLSASVGDRVTITCQASQDISNYLNW |
| | YQQKPGRAPKLLIYDASNLETGVPSRFSGSGSGTD |
| | FTFTISSLQPEDIATYYCQQYDNLLTFGGGTKVEI |
| | K |
| 1400 | SYVLTQPPSVSVAPGKTARITCGGNNIGSKSVHWY |
| | QQKPGQAPVLVVYDDSDRPSGIPERFSGSNSGNTA |
| | TLTISRVEAGDEADYYCQVWDSSGDHWVFGGGTKL |
| | TVL |
| 1401 | EIVLTQSPATLSLSPGERATLSCRASQSVSNYLAW |
| | YQQKPGQVPRLLIYDASNRATGIPARFSGSGSGTD |
| | FTLTISSLEPEDFAVYYCQQRSNWLTFGGGTKVEI |
| | K |
| 1402 | DIQMTQSPSSLSASVGDRVTITCQASQDISNYLNW |
| | YQQKPGKAPKLLISDASLLETGVPSRFSGSGSGTD |
| | FTFTISSLQPEDIATYYCQQHDNLPSFTFGPGTKV |
| | DIK |
| 1403 | EIVLTQSPGTLSLSPGERATLSCRASQSVSSSYLA |
| | WYQQKPGQAPRLLIYGASSRATGIPDRFSGSGSGT |
| | DFTLTISRLEPEDFAVYYCQQYGSSPRTFGQGTKV |
| | EIK |
| 1404 | EIVLTQSPGTLSLSPGERATLSCRASQSVSSSYLA |
| | WYQQTPGQAPRLLIYGASSRATGIPDRFSGSGSGT |
| | DFTLTISRLEPEDFAVYYCQQYGSSPRTFGQGTKV |
| | EIK |
| 1405 | QTVVTQEPSLTVSPGGTVTLTCASSTGAVTSGYYP |
| | NWFQQKPGQAPRALIYSTSNKHSWTPARFSGSLLG |
| | GKAALTLSGVQPEDEAEYYCLLYYGGAPVFGGGTK |
| | LTVL |
| 1406 | DIQLTQSPSFLSASVGDRVTITCRASQGISSYLAW |
| | YQQKPGKAPKLLIYAASTLQSGVPSRFSGSGSGTE |
| | FTLTISSLQPEDFATYYCQQLNSYPPAFGQGTKVE |
| | IK |
| 1407 | DIQMTQSPSSLSASVGDRVTITCQASQDISNYLNW |
| | YQQKPGKAPKLLIYDASNLETGVPSRFSGSGSGTD |
| | FTFTISSLQPEDIATYYCQQYDNLPQTFGPGTKVD |
| | IK |
| 1408 | QSALTQPASVSGSPGQSITISCTGTSSDVGSYNLV |
| | SWYQQHPGKAPKLMIYEVSKRPSGVSNRFSGSKSG |
| | NTASLTISGLQAEDEADYYCCSYAGSSLWVFGGGT |
| | KLTVL |
| 1409 | NFMLTQPHSVSESPGKTVTISCTRSSGSIASNYVQ |
| | WYQQRPGSAPTTVIYEDNQRPSGVPDRFSGSIDSS |
| | SNSASLTISGLKTEDEADYYCQSYDSSNQVFGGGT |
| | KLTVL |
| 1410 | EIVLTQSPATLSLSPGERATLSCRASQSVSSYLAW |
| | YQQKPGQAPRLLIYDASNRATGIPARFSGSGSGTD |
| | FTLTISSLEPEDFAVYYCQQRSNWLFTFGPGTKVD |
| | IK |
| 1411 | QSVLTQPPSVSAAPGQKVTISCSGSSSNIGNNYVS |
| | WYQQLPGTAPKLLIYDNNKRPSGIPDRFSGSKSGT |
| | SATLGITGLQTGDEADYYCGTWDSSLSAGVFGGGT |
| | KLTVL |
| 1412 | VIVLTQTPLSSPVTLGQPASISCRSRRSLVHTNGN |
| | TYLSWLHQRPGQTPRLLIHNVSNRFSGVPDRFSGS |
| | GAGTDFTLNISRVEADDVGIYYCMQASQFPLTFGG |
| | GTKLEIK |
| 1413 | QSALTQPASVSGSPGQSITISCTGTFSDIGNYDLV |
| | SWYQQHPGKAPKVIIYEGYKRPSGVSDRFSGSKSG |
| | NTASLTISGLQAEDEADYFCCSFAGSNREFGGGTK |
| | LTVL |
| 1414 | EIVLTQSPGTLSLSPGERATLSCRASQSVSSSYLA |
| | WYQQKPGQAPRLLIYGASSRATGIPDRFSGSGSGT |
| | DFTLTISRLEPEDFAVYYCQQYGSSPWTFGQGTKV |
| | EIK |
| 1415 | QSVLTQPPSVSAAPGQKVTISCSGSSSNIGNNYVS |
| | WYQQLPGTAPKLLIYDNNKRPSGIPDRFSGSKSGT |
| | SATLGITGLQTGDEADYYCGTWDSSLSAWVFGGGT |
| | KLTVL |
| 1416 | EIVLTQSPGTLSLSPGERATLSCRASQSVSNYLAW |
| | YQHKPGQAPRLLIYGASNGATGIPDRFSGSGSGTD |
| | FTLTISRLEPEDFAVYYCQHYSSSAPITFGQGTRL |
| | EIK |
| 1417 | EIVLTQSPATLSLSPGERATLSCRASQSVSSYLAW |
| | YQQKPGQAPRLLIFDASNRATGIPARFSGSGSGTD |
| | FTLTISSLEPEDFAVYYCQQRNKWPGTFGQGTKVE |
| | IK |
| 1418 | ETVLTQSPGTLSLSPGERATLSCRASQSVNSNYLA |
| | WYQQKPGQAPRLLIYGASSRATGIPDNFSGSGSGT |
| | DFTLTISRLEPEDFAVYYCQQYGDSPYTFGQGTNL |
| | EIK |
| 1419 | AIQLTQSPSSLSASVGDRVTITCRASQGISSSLAW |
| | YQQKPGKAPKLLIYSASTLQSGVPSRFSGSGSGTD |
| | FTLTITSLQPEDFATYYCQQLNSYPLTFGGGTKVE |
| | IK |
| 1420 | QSALTQPASVSGSPGQSITISCTGTSSDVGTYNLV |
| | SWYQQHPGKAPKLMIYEVSKRPSGVSNRFSGSKSG |
| | NTASLTISGLQAEDEADYYCCTYAGSSTWVFGGGT |
| | KLTVL |
| 1421 | DIQMTQSPSSLSASVGDRVTITCRASQSIAKFLNW |
| | YQKKPGKAPNLLISTASSFQSGVPSRFSGSGSGTD |
| | YTLTISGLQPEDFATYYCQQSYSSPYTFGQGTNLE |
| | IK |
| 1422 | DIQMTQSPSSVSASVGDRVTITCRASQGISSWLAW |
| | YQQKPGKAPKLLIYAASSLQSGIPSRFSGSGSGTD |
| | FTLTISSLQPEDFATYYCQQANSFPRTFGQGTKVE |
| | IK |
| 1423 | AIQLTQSPSSLSASVGDRVTITCRASQGISSALAW |
| | YQQKPGKAPKVLIYDASGLQSGVPSRFSGGGSGTD |
| | FTLTISSLQPEDFATYYCQQFNDYPLTFGGGTKVE |
| | IK |
| 1424 | QSVLTQPPSVSGAPGQRVTISCTGSNSNIGAGYDV |
| | HWYQQLPGTAPKLLIYVNTNRPSGVPDRFSGSKSG |
| | TSASLAITGLQAEDEAHYYCQSYDSSLSGSVFGGG |
| | TKLTVL |
| 1425 | DIQMTQSPSTLSASVGDRVTITCRASQIISSWLAW |
| | YQQKPGKAPKLLIYKASSLESGVPSRFSGSGSGTE |
| | FTLTISSLQPDDFATYYCQQYSTYYTFGQGTKLEI |
| | K |
| 1426 | DVVLTQSPLSLPVTLGQPASISCRSSHSLVYSDGY |
| | THLHWIQERPGQSPRRLIYSVSHRDSGVPDRFSGS |
| | GSATDFTLQISRVEAEDVGVYYCMQGSHWPWTFGQ |
| | GTKVEIK |
| 1427 | QSVLTQPPSASGTPGQRVTISCSGSSSNIGSNTVN |
| | WYQQLPGTAPKLLIYSNNQRPSGVPDRFSGSKSGT |
| | SASLAISGLQSEDEADYYCAAWDDSLNGPWVFGGG |
| | TKLTVL |
| 1428 | QSALTQPRSVSGSPGQSVTISCTGTSSDVGGYNYV |
| | SWYQQYPGKAPKLMIYEVSKRPSGVPDRFSGSKSG |
| | NTASLTISGLQAEDEADYYCCSYAGSYTWVFGTGT |
| | KVTVL |
| 1429 | DIQLTQSPSFLSASVGDRVTITCRASQGISSYLAW |
| | YQQKPGKAPKLLIYAASTLQVGVPSRFSGSGSGTE |
| | FTLTISSLQPEDFATYFCQQLNSYPFTFGPGTKVD |
| | IK |
| 1430 | DIQMTQSPSSLSASVGDRVTITCQASQDISNYLNW |
| | YQQKPGKAPKLLIYDASNLETGVPSRFSGSGSGTD |
| | FTFTISSLQPEDIATYYCQQYDNLPRTFGQGTKVE |
| | IK |
| 1431 | DIQLTQSPSFLSASVGDRVTITCRASQGISSYLAW |
| | YQQKPGKAPKLLIYAASTLQSGVPSSFSGSGSGTE |
| | FTLTISSLQPEDFATYYCQQLNSYPLTFGGGTKVE |
| | IK |
| 1432 | DIQMTQSPSSLSASVGDRVTITCRASQSISNFLNW |
| | YQQKPGKAPKLLIYAASSLQSGVPSRFSGSGSGTG |
| | FTLTISSLQPEDFATYYCQQSYSTPPDTFGQGTRL |
| | EIK |
| 1433 | DIQMTQSPSSLSASVGDRVTITCQASQDISNYLNW |
| | YQQKPGKAPKLLIYDASNLETGVPSRFSGSGSGTD |
| | FTFTISSLQPEDIATYYCQQYDNLPPTFGGGTKVE |
| | IK |
| 1434 | DIQMTQSPSSLSASVGDRVTITCRASQSISSYLNW |
| | YQQKPGKAPKLLIYAASSLQSGVPSRFSGSGSGTD |
| | FTLTISSLQPEDFATYYCQQSYTTPLFTFGPGTKV |
| | DIK |
| 1435 | DIQLTQSPSSLSASVGDRVTITCRASQGISSYLAW |
| | YQQKPGKAPKLLIYAASTLQSGVPSRFSGSGSGTD |
| | FTLTISSLQPEDFATYYCQQLNGYPHSAFGPGTKV |
| | DIK |
| 1436 | DIQMTQSPSSLSASVGDRVTITCQASQDIINYLNW |
| | YQQKPGKAPKLLIYGASNLETGVPSRFSGGGSGTD |
| | FTFTISSLQPEDIATYYCHQYDNLPPTFGQGTRLE |
| | IK |
| 1437 | DIQLTQSPSFLSASVGDRVTITCRASQGISSYLAW |
| | YQQKPGKAPKLLIYAASTLQSGVPSRFSGSGSGTE |
| | FTLTISSLQPEDFATYYCQQLNSYPLTFGGGTKVE |
| | IK |
| 1438 | DIQLTQSPSSLSASVGDRVTITCRASQGISSYLAW |
| | YQQKPGKAPKLLIYAASTLQSGVPSRFSGSGSGTD |
| | FTLTISSLQPEDVATYYCQQLNSNPPITFGPGTKV |
| | DIK |
| 1439 | DIQMTQSPSSLSASVGDRVTITCRASQSISSYLNW |
| | YQQKPGKAPKLLIFAASSLQTGAPSRFSGSGSGTD |
| | FTLTISSLQPEDFATYYCQQSYSTPPYTFGQGTKL |
| | EIK |
| 1440 | DIQMTQSPSSLSASVGDRVTITCQASQDINKYLNW |
| | YQQKPGKAPKLLIFDASHLETGVPSRFSASGSGTD |
| | FTFTISSLQPEDIATYYCHQYDNLPRTFGQGTRLE |
| | IK |
| 1441 | GGSFSDYY |
| 1442 | GGSFSDYF |
| 1443 | GITVSSNY |
| 1444 | GYTFTSYA |
| 1445 | ITHSGST |
| 1446 | INHSGST |
| 1447 | IYSGGST |
| 1448 | INTNTGNP |
| 1449 | QSVSTY |
| 1450 | QSVSSY |
| 1451 | QGISSY |
| 1452 | QSISSW |
| 1453 | DAS |
| 1454 | DAS |
| 1455 | AAS |
| 1456 | KAS |
| 1457 | ASTKGPSVFPLAPSSKSTSGGTAALGCLVKDYFPE |
| | PVTVSWNSGALTSGVHTFPAVLQSSGLYSLSSVVT |
| | VPSSSLGTQTYICNVNHKPSNTKVDKKVEPKSCDK |
| | THTCPPCPAPELLGGPSVFLFPPKPKDTLMISRTP |
| | EVTCVVVDVSHEDPEVKFNWYVDGVEVHNAKTKPR |
| | EEQYNSTYRVVSVLTVLHQDWLNGKEYKCKVSNKA |
| | LPAPIEKTISKAKGQPREPQVYTLPPSRDELTKNQ |
| | VSLTCLVKGFYPSDIAVEWESNGQPENNYKTTPPV |
| | LDSDGSFFLYSKLTVDKSRWQQGNVFSCSVMHEAL |
| | HNHYTQKSLSLSPGK |
| 1458 | RTVAAPSVFIFPPSDEQLKSGTASVVCLLNNFYPR |
| | EAKVQWKVDNALQSGNSQESVTEQDSKDSTYSLSS |
| | TLTLSKADYEKHKVYACEVTHQGLSSPVTKSFNRG |
| | EC |
| 1459 | RVQPTESIVRFPNITNLCPFGEVFNATRFASVYAW |
| | NRKRISNCVADYSVLYNSASFSTFKCYGVSPTKLN |
| | DLCFTNVYADSFVIRGDEVRQIAPGQTGKIADYNY |
| | KLPDDFTGCVIAWNSNNLDSKVGGNYNYLYRLFRK |
| | SNLKPFERDISTEIYQAGSTPCNGVEGFNCYFPLQ |
| | SYGFQPTNGVGYQPYRVVVLSFELLHAPATVCGPK |
| | KSTNLVKNKCVNF |
| 1460 | MFVFLVLLPLVSSQCVNLTTRTQLPPAYTNSFTRG |
| | VYYPDKVFRSSVLHSTQDLFLPFFSNVTWFHAIHV |
| | SGTNGTKRFDNPVLPFNDGVYFASTEKSNIIRGWI |
| | FGTTLDSKTQSLLIVNNATNVVIKVCEFQFCNDPF |
| | LGVYYHKNNKSWMESEFRVYSSANNCTFEYVSQPF |
| | LMDLEGKQGNFKNLREFVFKNIDGYFKIYSKHTPI |
| | NLVRDLPQGFSALEPLVDLPIGINITRFQTLLALH |
| | RSYLTPGDSSSGWTAGAAAYYVGYLQPRTFLLKYN |
| | ENGTITDAVDCALDPLSETKCTLKSFTVEKGIYQT |
| | SNFRVQPTESIVRFPNITNLCPFGEVFNATRFASV |
| | YAWNRKRISNCVADYSVLYNSASFSTFKCYGVSPT |
| | KLNDLCFTNVYADSFVIRGDEVRQIAPGQTGKIAD |
| | YNYKLPDDFTGCVIAWNSNNLDSKVGGNYNYLYRL |
| | FRKSNLKPFERDISTEIYQAGSTPCNGVEGFNCYF |
| | PLQSYGFQPTNGVGYQPYRVVVLSFELLHAPATVC |
| | GPKKSTNLVKNKCVNFNFNGLTGTGVLTESNKKFL |
| | PFQQFGRDIADTTDAVRDPQTLEILDITPCSFGGV |
| | SVITPGTNTSNQVAVLYQDVNCTEVPVAIHADQLT |
| | PTWRVYSTGSNVFQTRAGCLIGAEHVNNSYECDIP |
| | IGAGICASYQTQTNSPRRARSVASQSIIAYTMSLG |
| | AENSVAYSNNSIAIPTNFTISVTTEILPVSMTKTS |
| | VDCTMYICGDSTECSNLLLQYGSFCTQLNRALTGI |
| | AVEQDKNTQEVFAQVKQIYKTPPIKDFGGFNFSQI |
| | LPDPSKPSKRSFIEDLLFNKVTLADAGFIKQYGDC |
| | LGDIAARDLICAQKFNGLTVLPPLLTDEMIAQYTS |
| | ALLAGTITSGWTFGAGAALQIPFAMQMAYRFNGIG |
| | VTQNVLYENQKLIANQFNSAIGKIQDSLSSTASAL |
| | GKLQDVVNQNAQALNTLVKQLSSNFGAISSVLNDI |
| | LSRLDKVEAEVQIDRLITGRLQSLQTYVTQQLIRA |
| | AEIRASANLAATKMSECVLGQSKRVDFCGKGYHLM |
| | SFPQSAPHGVVFLHVTYVPAQEKNFTTAPAICHDG |
| | KAHFPREGVFVSNGTHWFVTQRNFYEPQIITTDNT |
| | FVSGNCDVVIGIVNNTVYDPLQPELDSFKEELDKY |
| | FKNHTSPDVDLGDISGINASVVNIQKEIDRLNEVA |
| | KNLNESLIDLQELGKYEQYIKWPWYIWLGFIAGLI |
| | AIVMVTIMLCCMTSCCSCLKGCCSCGSCCKFDEDD |
| | SEPVLKGVKLHYT |
| 1461 | GFTFSSYG |
| 1462 | GFTFSSYG |
| 1463 | GYSFTSYW |
| 1464 | GYSFTSYW |
| 1465 | GYSFTSYW |
| 1466 | GYSFTSYW |
| 1467 | GYSFTSYW |
| 1468 | GGSINRNHF |
| 1469 | GGSINRNHF |
| 1470 | GYTFTSYG |
| 1471 | GFTFSYFE |
| 1472 | GFTFSYFE |
| 1473 | GYKFSNYY |
| 1474 | GYIFTNFY |
| 1475 | GFNFSSYA |
| 1476 | GIIVSRNE |
| 1477 | GGTFSTYA |
| 1478 | GFTFSSYG |
| 1479 | GFTFNNYA |
| 1480 | GFVFSNYW |
| 1481 | GGSISSGGYY |
| 1482 | GYNFNNYW |
| 1483 | GYTFTSYA |
| 1484 | GYTLTELS |
| 1485 | GFTFSSYG |
| 1486 | GFTFSSYP |
| 1487 | GGSISSGGYY |
| 1488 | GGSISSGGYY |
| 1489 | GFTVSSNY |
| 1490 | GGSISSYY |
| 1491 | gytftgyf |
| 1492 | GFTASSNY |
| 1493 | GGTFSSYG |
| 1494 | GGRFGSFA |
| 1495 | GFTFTDYA |
| 1496 | GGSISSYY |
| 1497 | gytftdyy |
| 1498 | GYSFTGHY |
| 1499 | GFTFSNYG |
| 1500 | GGSISSDVYS |
| 1501 | GDTFNSYA |
| 1502 | GFTFSHYG |
| 1503 | GYSFPAHW |
| 1504 | GYNFDTYW |
| 1505 | GYSFSGYW |
| 1506 | GYYFAAHW |
| 1507 | GYSFPAFW |
| 1508 | GYSFPAYW |
| 1509 | GYTLTELS |
| 1510 | gytftryw |
| 1511 | GFTFSSYS |
| 1512 | GFTFSSYS |
| 1513 | GGSISSSSYY |
| 1514 | GFSLSTSGVG |
| 1515 | GFTFSNAW |
| 1516 | GFTFSSYE |
| 1517 | GFTFSSYE |
| 1518 | GGSISSSSYY |
| 1519 | GGSISSGGYY |
| 1520 | GGSISSRSYY |
| 1521 | GFSLSNARMG |
| 1522 | GFSLSTSGVG |
| 1523 | GFTISPYG |
| 1524 | GFTISPYG |
| 1525 | GYTFGDYG |
| 1526 | GYTFGDYG |
| 1527 | GFSLSTSGVG |
| 1528 | GGSISTYR |
| 1529 | GFTFSNAW |
| 1530 | GYIFTNYA |
| 1531 | GYAFTSYQ |
| 1532 | GFTFGDYA |
| 1533 | GASFSSYY |
| 1534 | GYSFTKYW |
| 1535 | GFTFSSYA |
| 1536 | GDSVSSNTVA |
| 1537 | GFTFDDYG |
| 1538 | GFAFDDFA |
| 1539 | GFTVSSTF |
| 1540 | GGSIKRRGYY |
| 1541 | GGSFSAYY |
| 1542 | GGSISSSDYY |
| 1543 | GFTFSNAW |
| 1544 | GGTFSTYA |
| 1545 | GLRFTDAW |
| 1546 | GFSFSSYA |
| 1547 | GFSFSDFA |
| 1548 | GFTFTTYG |
| 1549 | GFTFRSYS |
| 1550 | GDSITSYY |
| 1551 | GGSFSGSY |
| 1552 | GGSFTDHY |
| 1553 | GGSISSSSYY |
| 1554 | GFSLSNARMG |
| 1555 | GFTFSSYG |
| 1556 | GFTFGDYA |
| 1557 | GFTFSGSA |
| 1558 | GYSFTSYW |
| 1559 | gytftsyy |
| 1560 | GGTFSSYA |
| 1561 | GFTFSNAW |
| 1562 | GFTFRSYW |
| 1563 | GFTFSTYA |
| 1564 | GFTFSSYG |
| 1565 | GFTVSSNY |
| 1566 | GGPISSGGYY |
| 1567 | GGSISSSYYY |
| 1568 | GGSISSSSYY |
| 1569 | GFTFSSYS |
| 1570 | GYTFTSYG |
| 1571 | GFTFSSYW |
| 1572 | GGSISSGGYS |
| 1573 | GYSFPAHW |
| 1574 | GYSFPAFY |
| 1575 | GYSFPAHW |
| 1576 | GFTFSASA |
| 1577 | GGSISSGGYY |
| 1578 | GFTFSSYW |
| 1579 | GYTFTSYG |
| 1580 | GFSLSTSGVS |
| 1581 | GFTFSSYG |
| 1582 | GFTFSSYA |
| 1583 | GFTFSSYE |
| 1584 | GFTFSIYA |
| 1585 | GFTFTSYG |
| 1586 | GFTFSSYG |
| 1587 | GFAFNKYG |
| 1588 | GFTFSSYG |
| 1589 | GGSISSSSYY |
| 1590 | GGAITTSSYF |
| 1591 | GFTFSAYG |
| 1592 | GFTFNNYG |
| 1593 | GGSINSYY |
| 1594 | GFTFSRFG |
| 1595 | GFTFSRFG |
| 1596 | GFTFSSFW |
| 1597 | GGTFSSYT |
| 1598 | GGSFSSYT |
| 1599 | EFSLDSRGVG |
| 1600 | GGSISSYY |
| 1601 | GFTFSRYG |
| 1602 | GFPFSGYA |
| 1603 | GFTFINYD |
| 1604 | GFAFDKFW |
| 1605 | GGSINRDGHY |
| 1606 | GGSISSYY |
| 1607 | GGSVSSGSYF |
| 1608 | GYTFTSYG |
| 1609 | GYTFTGYY |
| 1610 | GYTLTELS |
| 1611 | GYRFTSYG |
| 1612 | GYRFTSYG |
| 1613 | GYTFTSYA |
| 1614 | gytftsyy |
| 1615 | GYTFTNYY |
| 1616 | GGTFSSYT |
| 1617 | GGTFNSYA |
| 1618 | GYTFTSSD |
| 1619 | EFSLDARGVG |
| 1620 | GFTFISYA |
| 1621 | GFTFSSYA |
| 1622 | GFTFSSYG |
| 1623 | GFTFSSHG |
| 1624 | GFTFSSYA |
| 1625 | GFTFSSYA |
| 1626 | GFTFSTYG |
| 1627 | GFTFSTFA |
| 1628 | GFIFGDYA |
| 1629 | GFIFGDYA |
| 1630 | GFTFSSYW |
| 1631 | GASISSGDYY |
| 1632 | GGVLSDYY |
| 1633 | GGVLSDYY |
| 1634 | GGSFSDYY |
| 1635 | GGSFSDYF |
| 1636 | GDSISSNNW |
| 1637 | GGSISSYY |
| 1638 | GDSISSYY |
| 1639 | GGSISGYY |
| 1640 | GGSISSGSYY |
| 1641 | DDSISSGSYY |
| 1642 | GYSFTSYW |
| 1643 | GYSFTSYW |
| 1644 | GYTFTSYA |
| 1645 | GYTFSFYW |
| 1646 | GGAFSSGRHY |
| 1647 | GGSFSSYY |
| 1648 | GYTLTELS |
| 1649 | GFTFSDYY |
| 1650 | GITVSSNY |
| 1651 | GFTFSRFW |
| 1652 | GFTFSNYW |
| 1653 | AFSFHLHG |
| 1654 | GFTFSSYA |
| 1655 | GFIFDDYG |
| 1656 | GFTVSSNY |
| 1657 | GGSIGSSSYF |
| 1658 | GGSISSSSYY |
| 1659 | GFTFSSYD |
| 1660 | GFTFSRSA |
| 1661 | GFTFSSQS |
| 1662 | GFTFEEYS |
| 1663 | GYTFGRYW |
| 1664 | gytfstyy |
| 1665 | GGTFSSYA |
| 1666 | GATFTTYA |
| 1667 | GFTLSSYA |
| 1668 | GFTFSNYD |
| 1669 | GFTFDDYA |
| 1670 | GFTFDDYA |
| 1671 | GFTFDDYA |
| 1672 | GFTFSSYT |
| 1673 | TFIFSNSE |
| 1674 | GFTVSSNY |
| 1675 | GGSFSGYF |
| 1676 | GGSFSGYY |
| 1677 | GGSLSSYY |
| 1678 | GGSISTFY |
| 1679 | GGSVSSYF |
| 1680 | GFSFNTPGVG |
| 1681 | GFSFSNHG |
| 1682 | GFTFSNSA |
| 1683 | EFTFSSYE |
| 1684 | gytftnfa |
| 1685 | GYTFTSYG |
| 1686 | GFSFSRYG |
| 1687 | GFNFNSYT |
| 1688 | GFNFNSYT |
| 1689 | GFTFSSYE |
| 1690 | GYIFTSYG |
| 1691 | GYSFNDYG |
| 1692 | GYTLTELS |
| 1693 | GNTFSTYY |
| 1694 | GFTFSDVW |
| 1695 | GLTFDNAW |
| 1696 | RFTFSSYA |
| 1697 | GFTFDDYA |
| 1698 | GNTFTTYY |
| 1699 | GGTFNSYT |
| 1700 | GFSLNTPGAG |
| 1701 | GFSFNTPGVG |
| 1702 | GFTFTFSDYY |
| 1703 | GFTFSDYY |
| 1704 | GFSFSRYG |
| 1705 | GLSFSRYG |
| 1706 | GFSFNNFG |
| 1707 | GFTLSSYA |
| 1708 | GFTFSSYE |
| 1709 | GFTFSSYA |
| 1710 | GGSISPYS |
| 1711 | GDSIRSSSFY |
| 1712 | GYSFTTYA |
| 1713 | GGTFSSYA |
| 1714 | GGTFSSYA |
| 1715 | GFTFSHAW |
| 1716 | GFTFSSYE |
| 1717 | GFTVSSNY |
| 1718 | GGSISSYY |
| 1719 | GYTFTTYG |
| 1720 | GYTFTNYG |
| 1721 | GYTLTELS |
| 1722 | GYTLTELS |
| 1723 | GYTLTELS |
| 1724 | GYTLTELS |
| 1725 | GYTFTSYA |
| 1726 | GGTFSSYA |
| 1727 | GFSLSNARMG |
| 1728 | GFSLSTTGVG |
| 1729 | GFSLSTSGVG |
| 1730 | GFTFSSYS |
| 1731 | GFTFSSYS |
| 1732 | GFTFSSYA |
| 1733 | GFTFSSYA |
| 1734 | GFTFSSYA |
| 1735 | GFTFGSYG |
| 1736 | GFTFSSYA |
| 1737 | GFTFSIYA |
| 1738 | GFTVSSNY |
| 1739 | GFTFSNYW |
| 1740 | GGSFSGYY |
| 1741 | DGSFSGHY |
| 1742 | GGSFSGYY |
| 1743 | GGSISSYY |
| 1744 | GGSISSYY |
| 1745 | GYNFTSYW |
| 1746 | GYTFTSYA |
| 1747 | GFTVSSNY |
| 1748 | GGSISSGLYH |
| 1749 | GGTFSSYT |
| 1750 | GFTFGRHG |
| 1751 | GFTFGRYG |
| 1752 | GFSLTTRGEG |
| 1753 | GYTFTFYT |
| 1754 | GFTFTSSA |
| 1755 | GFSLSTSGMC |
| 1756 | GFTFTTYA |
| 1757 | GFAFTTYA |
| 1758 | GYTFTSYG |
| 1759 | GYTFSRYG |
| 1760 | GYTFTGYY |
| 1761 | GSGFTFRNAW |
| 1762 | GFTFNFYG |
| 1763 | GFTFDDYA |
| 1764 | GFIFDDYT |
| 1765 | GYTFTSYG |
| 1766 | GYTFTSYG |
| 1767 | GDTFNDYH |
| 1768 | GGTFSSYA |
| 1769 | GGTFSSYA |
| 1770 | GFTFSNAW |
| 1771 | GLTFTKAW |
| 1772 | GFTFSTYA |
| 1773 | GFTFSNYA |
| 1774 | GFTFSSYA |
| 1775 | GFTFSSYG |
| 1776 | GFTFSSYG |
| 1777 | GFTFSSFA |
| 1778 | GFTFSNYG |
| 1779 | GFTFSSYG |
| 1780 | GFTFSSYA |
| 1781 | GFTFHDYA |
| 1782 | GVIVSRNY |
| 1783 | GFTVSSNY |
| 1784 | EFTVSSNY |
| 1785 | GFTVSSNY |
| 1786 | GFTVSSNY |
| 1787 | GITVSSNY |
| 1788 | GFTVSSNY |
| 1789 | GFTFSSYW |
| 1790 | GGSISSGGYY |
| 1791 | GGSISSGGYY |
| 1792 | GGSFSGYY |
| 1793 | GGSFSDDF |
| 1794 | GGSISSYY |
| 1795 | GYSFTSYW |
| 1796 | GDTFSNYP |
| 1797 | GFTFSTSA |
| 1798 | GFTFSTYA |
| 1799 | GFTFFSYA |
| 1800 | GFTVSSNY |
| 1801 | AGSISSDTYY |
| 1802 | GYTFTSYG |
| 1803 | GYTFTNYY |
| 1804 | GGTFSSYT |
| 1805 | GFSLSTSGVG |
| 1806 | GFTVSSYD |
| 1807 | GFTFRNYG |
| 1808 | GFTFSSYG |
| 1809 | GFTVSRNY |
| 1810 | GFTVSSNY |
| 1811 | GFTVSRNY |
| 1812 | GLTVSSNY |
| 1813 | GFTVSSNY |
| 1814 | GLIVSSNY |
| 1815 | GITVRSNY |
| 1816 | GFTVSSNY |
| 1817 | GVTVSSNY |
| 1818 | GLTVSSNY |
| 1819 | GFIVSSNY |
| 1820 | EFIVSRNY |
| 1821 | IWYDGSNK |
| 1822 | IWYDGSNK |
| 1823 | IDPSDSYT |
| 1824 | IDPSDSYT |
| 1825 | IDPSDSYT |
| 1826 | IDPSDSYT |
| 1827 | IDPSDSYT |
| 1828 | ASYTGTT |
| 1829 | ASYTGTT |
| 1830 | ISAYNGNT |
| 1831 | ISSSGTNI |
| 1832 | ISSSGTNI |
| 1833 | INPYSGET |
| 1834 | VNPNDGSS |
| 1835 | ISATGGTT |
| 1836 | ISSSGTGV |
| 1837 | IIPIFGTP |
| 1838 | ISYDGSNK |
| 1839 | ISSYGDNT |
| 1840 | IKQDESEE |
| 1841 | IYYSGST |
| 1842 | IYGGDSDT |
| 1843 | INTNTGNP |
| 1844 | FDPEDGET |
| 1845 | ISYDGSNK |
| 1846 | ISYDGSNK |
| 1847 | IYYSGST |
| 1848 | IYYSGST |
| 1849 | LYSGGNE |
| 1850 | IYYSGST |
| 1851 | INPSSGVA |
| 1852 | IYAGGGT |
| 1853 | ILPVLDTT |
| 1854 | VTPIVGVP |
| 1855 | ISYDGNDK |
| 1856 | IYYSGST |
| 1857 | VNPNRGGT |
| 1858 | INPDSGGT |
| 1859 | ITGSGGST |
| 1860 | VFHTGSA |
| 1861 | IIPILRLA |
| 1862 | IWYDGSKK |
| 1863 | IFPGDSDT |
| 1864 | IYPGDSDS |
| 1865 | IFPSDSDT |
| 1866 | IFPSDSDT |
| 1867 | VFPGDSDT |
| 1868 | IFPGDSDT |
| 1869 | FDPEDGET |
| 1870 | MKPGDGKT |
| 1871 | ISSSSSYI |
| 1872 | ISSSSSTI |
| 1873 | IYYSGST |
| 1874 | IYWDDDK |
| 1875 | IKSKTDGGTT |
| 1876 | ISSSGSTI |
| 1877 | ISSSGSTI |
| 1878 | IYYSGST |
| 1879 | IYYSGST |
| 1880 | IYYSGST |
| 1881 | IFSNDEK |
| 1882 | IYWDDDK |
| 1883 | IWYDGSNK |
| 1884 | IWYDGSNK |
| 1885 | ISGYNGDP |
| 1886 | ISGYNGDP |
| 1887 | IYWDDDK |
| 1888 | IYYSGRT |
| 1889 | IKRIIDGGTI |
| 1890 | TNTNTGNP |
| 1891 | INPSGSAT |
| 1892 | ITWNSGNI |
| 1893 | ISQSAST |
| 1894 | IYPDDSET |
| 1895 | ISGSGDKT |
| 1896 | TYYRSNWYN |
| 1897 | ISWNSNSV |
| 1898 | INWNSDNI |
| 1899 | IYTVGDT |
| 1900 | IYYSGTT |
| 1901 | INRRGNT |
| 1902 | IYYSGNT |
| 1903 | IKSKTDGGTT |
| 1904 | IIPSLRTA |
| 1905 | IKSRGSGGTI |
| 1906 | ISYDGRNK |
| 1907 | VSYDSRQQ |
| 1908 | IWYDGSNE |
| 1909 | LSNDDRTR |
| 1910 | IYSSGDT |
| 1911 | INPSGGS |
| 1912 | INHSGRT |
| 1913 | IYYSGST |
| 1914 | IFSNDEK |
| 1915 | ISYDGSNK |
| 1916 | IRSKAYGGTT |
| 1917 | IRSKANSYAT |
| 1918 | IDPSDSYT |
| 1919 | INPSGGST |
| 1920 | IIPIFHIA |
| 1921 | IKSKTDGGTT |
| 1922 | IFSDWSTT |
| 1923 | ISGSGGST |
| 1924 | ISYDGSNK |
| 1925 | IYSGSST |
| 1926 | IYYSGST |
| 1927 | IYYSGST |
| 1928 | IYYSGST |
| 1929 | ISSSSSYI |
| 1930 | ISAYNGNT |
| 1931 | INSDGSST |
| 1932 | IYHSGST |
| 1933 | IFPSDSDT |
| 1934 | IFPGDSET |
| 1935 | IFPGDSDT |
| 1936 | IRTRTNRYAT |
| 1937 | IYYSGST |
| 1938 | INSDGSST |
| 1939 | ISAYNGNT |
| 1940 | IYWDDDK |
| 1941 | ISYDGSNK |
| 1942 | ISYDGSNK |
| 1943 | ISSSGSTI |
| 1944 | ISGSGGST |
| 1945 | ISFDGSNI |
| 1946 | ISYDGSNK |
| 1947 | IWNDGNKQ |
| 1948 | IWYDGSNK |
| 1949 | IFYSGST |
| 1950 | ISYSGDT |
| 1951 | ISFDGSNK |
| 1952 | ISYEGSIR |
| 1953 | IYSGGST |
| 1954 | ISYEGSTE |
| 1955 | ISYEGSTE |
| 1956 | IKEDGSEK |
| 1957 | IIPMLNKT |
| 1958 | IIPMLNKT |
| 1959 | IYWNDNK |
| 1960 | IYYRGST |
| 1961 | ISYEGSTE |
| 1962 | ISSSSSTV |
| 1963 | ISSSSSTT |
| 1964 | LNKDESEK |
| 1965 | IYSGRNT |
| 1966 | IYYSGST |
| 1967 | IYYSGST |
| 1968 | ISAYNGNT |
| 1969 | INPNSGGT |
| 1970 | FDPEDGET |
| 1971 | INTDNEKT |
| 1972 | INTDNGKT |
| 1973 | INAGNGNT |
| 1974 | INPSGGST |
| 1975 | INPSDGST |
| 1976 | IIPMLNKT |
| 1977 | IIPIFGPP |
| 1978 | MNPNTGTT |
| 1979 | IYWNDYK |
| 1980 | ISGSGGST |
| 1981 | ISGSGGTT |
| 1982 | ISYDGSNK |
| 1983 | ISYDGINK |
| 1984 | ISYDGSNK |
| 1985 | ISYDGSNK |
| 1986 | MWFDGVDK |
| 1987 | ISYDEINK |
| 1988 | IRGRLVGATV |
| 1989 | IRGRLVGATV |
| 1990 | IKQDGSEK |
| 1991 | IYYSGST |
| 1992 | IHRSGST |
| 1993 | IHRSGST |
| 1994 | ITHSGST |
| 1995 | INHSGST |
| 1996 | IYHSGTT |
| 1997 | IYTSGST |
| 1998 | IYHSGSA |
| 1999 | LHYSGRS |
| 2000 | IYTSGST |
| 2001 | IYAGEST |
| 2002 | IYPGDSDT |
| 2003 | IYPGDSDT |
| 2004 | INTNTGNP |
| 2005 | IYPGDFDT |
| 2006 | IYSGVIT |
| 2007 | VTHSGST |
| 2008 | FDPEDGET |
| 2009 | ISSSGSTI |
| 2010 | IYSGGST |
| 2011 | IKEDGSVM |
| 2012 | IKSDGSET |
| 2013 | IWFDGSKK |
| 2014 | ISSSGGGT |
| 2015 | ITWNSGSI |
| 2016 | IYSGGST |
| 2017 | IYYGGST |
| 2018 | IYYSGST |
| 2019 | IGTAGDT |
| 2020 | MSYDGSDI |
| 2021 | ISYDGNNK |
| 2022 | VSWNSGTI |
| 2023 | INPADSDT |
| 2024 | INPSGDST |
| 2025 | IIPIFGTA |
| 2026 | IFPIFTAA |
| 2027 | VSGSGGST |
| 2028 | ISSDGNNR |
| 2029 | ISWNSGSI |
| 2030 | ISWNSGTI |
| 2031 | ISWNSEKI |
| 2032 | INSGSSII |
| 2033 | ISSSDNSV |
| 2034 | IYSGGST |
| 2035 | INHSGKT |
| 2036 | INHSGST |
| 2037 | MYNSGST |
| 2038 | IYYSGRT |
| 2039 | IFYTGTS |
| 2040 | IYWDDEK |
| 2041 | IWYDGDNR |
| 2042 | IYYDGSNE |
| 2043 | IDSSSTTI |
| 2044 | INTKTGIP |
| 2045 | ISAYNGNT |
| 2046 | ISHDDSQK |
| 2047 | ISYEGSKK |
| 2048 | ISYEGSKK |
| 2049 | ISSSGSTI |
| 2050 | INTNTGSP |
| 2051 | ISAYNGET |
| 2052 | FDPEDGET |
| 2053 | ISPSGDDA |
| 2054 | IRSKSDGGTT |
| 2055 | VKSKTDGGTT |
| 2056 | ISYDGSNK |
| 2057 | ISWDGGST |
| 2058 | ISPSGDDA |
| 2059 | IVPMLGIT |
| 2060 | IYWDDDK |
| 2061 | IYWDDEK |
| 2062 | ISSGGDAI |
| 2063 | MSSDSDYI |
| 2064 | ISHDESQK |
| 2065 | ISHDESQK |
| 2066 | ISYEGSKK |
| 2067 | ISYDGSNK |
| 2068 | ITSSGNTI |
| 2069 | ISSSSGTI |
| 2070 | IYYTGKT |
| 2071 | VYNSGTA |
| 2072 | IDTNTGKP |
| 2073 | IIPIFGTA |
| 2074 | IIPIFGTA |
| 2075 | IKSNTDGGTT |
| 2076 | ISSSGSTI |
| 2077 | IYSGGST |
| 2078 | IYYSGST |
| 2079 | ISAYNGNT |
| 2080 | ISTYSGNT |
| 2081 | FDPEDGET |
| 2082 | FDPEDGET |
| 2083 | FDPEDGET |
| 2084 | FDPEDGET |
| 2085 | INAGNGNT |
| 2086 | IIPIFGTA |
| 2087 | IFSNDKK |
| 2088 | IYWDDDK |
| 2089 | IFWDDDK |
| 2090 | ISSSSSYI |
| 2091 | ISSSSSYI |
| 2092 | ISYDGSNK |
| 2093 | ISYDGSNK |
| 2094 | ISYDGSNK |
| 2095 | IWNDGSNK |
| 2096 | ISYDGSNK |
| 2097 | ISYDGSNK |
| 2098 | IYSGGST |
| 2099 | IKEDGSET |
| 2100 | IDHSGST |
| 2101 | INHSGST |
| 2102 | INHSGST |
| 2103 | IYYSGST |
| 2104 | IYYSGST |
| 2105 | IDPSDSYT |
| 2106 | INTNTGNP |
| 2107 | VYSGGHA |
| 2108 | IFSSGST |
| 2109 | IIPILGIA |
| 2110 | ISTYSGNT |
| 2111 | ISTYSGNT |
| 2112 | IYWDDDQ |
| 2113 | INTNTGTP |
| 2114 | IWGSGNT |
| 2115 | IDWDDDK |
| 2116 | ISDSGGSA |
| 2117 | ISDGGGSA |
| 2118 | ISAYNGNT |
| 2119 | ISGYNGNT |
| 2120 | INPNSGGT |
| 2121 | IKSKNDGGTT |
| 2122 | ISYDGNKR |
| 2123 | ISWNSGSI |
| 2124 | ITWNYATV |
| 2125 | ISAYNGNT |
| 2126 | ISAYNGNT |
| 2127 | INPNSGET |
| 2128 | IIPIFGTA |
| 2129 | IIPILGIA |
| 2130 | IKSKTDGGTT |
| 2131 | IKSRSDGGKI |
| 2132 | ISGSGGST |
| 2133 | ISANGRSP |
| 2134 | ISGSGGST |
| 2135 | ISYDGSNK |
| 2136 | ISYDGSNK |
| 2137 | ISYDGANK |
| 2138 | MWHDGSNK |
| 2139 | IWYDGSNK |
| 2140 | ISYDGSNK |
| 2141 | ISWNSGSI |
| 2142 | IYSGGST |
| 2143 | IYSGGTT |
| 2144 | IYSGGST |
| 2145 | IYSGGST |
| 2146 | LYSGGTT |
| 2147 | IYSGGST |
| 2148 | IYSGGST |
| 2149 | IKSDGSST |
| 2150 | IYYSGST |
| 2151 | IYYSGST |
| 2152 | ISHGGKT |
| 2153 | INHSGTT |
| 2154 | IYYSGST |
| 2155 | IYPGDSDT |
| 2156 | IIPIVGFA |
| 2157 | ISYDGSN |
| 2158 | ISYDGSNK |
| 2159 | ISGISDSGGNT |
| 2160 | IYSGGST |
| 2161 | IYTTGST |
| 2162 | ISAYNGNT |
| 2163 | INPSGGST |
| 2164 | IIPILGIA |
| 2165 | IYWDDDK |
| 2166 | ISARGSVT |
| 2167 | ISYDGSNK |
| 2168 | ISNYGSNK |
| 2169 | IYSGGST |
| 2170 | IYSGGST |
| 2171 | IYSGGTT |
| 2172 | IYSGGST |
| 2173 | IYSGGST |
| 2174 | LYAGGST |
| 2175 | IYSGGST |
| 2176 | IYSGGST |
| 2177 | IYSGGST |
| 2178 | IYSGGST |
| 2179 | IYSGGST |
| 2180 | IYSGGST |
| 2181 | QSIASY |
| 2182 | QGISSY |
| 2183 | SSDVGGYNY |
| 2184 | QSISDW |
| 2185 | QSISSY |
| 2186 | QDISNY |
| 2187 | QSVSSSY |
| 2188 | NSNIGINN |
| 2189 | SGHSSYA |
| 2190 | ALPKQY |
| 2191 | QSISSY |
| 2192 | QGISSA |
| 2193 | SSDFGTFHL |
| 2194 | AFNIGTNF |
| 2195 | QSLVYYDGNTY |
| 2196 | QSISRW |
| 2197 | QHISNY |
| 2198 | ALPKQY |
| 2199 | QSVLYSSNNNKNY |
| 2200 | GASIASNY |
| 2201 | QSVLYSSNNKNY |
| 2202 | HSVFFSKVNKDY |
| 2203 | QSISSW |
| 2204 | SSDVGGYNY |
| 2205 | ALPKQY |
| 2206 | SSDVGGYNY |
| 2207 | QSVSSSY |
| 2208 | QSVSSSY |
| 2209 | EDIDNH |
| 2210 | QSVSSSY |
| 2211 | RSNIGSKN |
| 2212 | SSDVGSYHY |
| 2213 | QSVLYSANNKYY |
| 2214 | QSVKSY |
| 2215 | KDINSY |
| 2216 | QSVLYSSNNKNY |
| 2217 | QDISSS |
| 2218 | ALSNQY |
| 2219 | QDISNF |
| 2220 | QAISNS |
| 2221 | RDIHNL |
| 2222 | NSNIGSNY |
| 2223 | QGISTNY |
| 2224 | GARYN |
| 2225 | QSISNH |
| 2226 | QSISTNY |
| 2227 | QSISTNY |
| 2228 | QSISTNY |
| 2229 | ALPKKY |
| 2230 | TGAVTSGHY |
| 2231 | SSNIGAGYD |
| 2232 | KLGDKY |
| 2233 | SSNIGNNY |
| 2234 | QSVSSN |
| 2235 | TGAVTSGHY |
| 2236 | QSISSY |
| 2237 | SSDVGGYNY |
| 2238 | QSVLYSSNNKNY |
| 2239 | QSVSSSY |
| 2240 | SSNIGNNY |
| 2241 | SSDVGGYNY |
| 2242 | QSLLHSNGYNY |
| 2243 | QSLLHSNGYNY |
| 2244 | QSLLHSNGYNY |
| 2245 | QSIASY |
| 2246 | QGISSY |
| 2247 | NIGSKS |
| 2248 | KLGDEY |
| 2249 | SSNIGNNY |
| 2250 | SSDVGGYNY |
| 2251 | LSINTD |
| 2252 | QGMSNY |
| 2253 | QSINSW |
| 2254 | QSISSW |
| 2255 | QTVSSTY |
| 2256 | SSNVGNQG |
| 2257 | QSVLYNSNNKDY |
| 2258 | SGSIASYF |
| 2259 | SGSVSTTYY |
| 2260 | QSVSDN |
| 2261 | QSLVHSDGNTY |
| 2262 | SSNIGNNY |
| 2263 | SSNIGSNY |
| 2264 | QSLVHSDGNTY |
| 2265 | QSLVYSDGNTY |
| 2266 | QSVRSNY |
| 2267 | QSLRQSQRFSY |
| 2268 | QSLLHSIGKTH |
| 2269 | HDIRTW |
| 2270 | QDIGNW |
| 2271 | SLETYY |
| 2272 | SLRTSY |
| 2273 | SSDVGGYNY |
| 2274 | SSNIGAGYD |
| 2275 | QSVLYSSNNKNY |
| 2276 | QSLVHSDGNTY |
| 2277 | SSDVGGYNY |
| 2278 | QSISSY |
| 2279 | SSDVGGYNY |
| 2280 | QSISSY |
| 2281 | SLRSYY |
| 2282 | ELGDTD |
| 2283 | QSISSW |
| 2284 | QSLVHSDGNTY |
| 2285 | QSISSY |
| 2286 | SSNIGAGYD |
| 2287 | SSNIGSNY |
| 2288 | SLRSYY |
| 2289 | QDISNY |
| 2290 | SSNIGNNY |
| 2291 | QSVSSN |
| 2292 | KLGDKY |
| 2293 | QSISTNY |
| 2294 | HSISTNY |
| 2295 | QTISTNY |
| 2296 | QTINSGY |
| 2297 | QSVSSSY |
| 2298 | ALPKQY |
| 2299 | QSISSY |
| 2300 | KLGDTY |
| 2301 | QSLLHSDGKTY |
| 2302 | QSLLHSDGKTY |
| 2303 | QSLLHSNGYNY |
| 2304 | ALPKKY |
| 2305 | SSDVGGYNY |
| 2306 | ALPKKY |
| 2307 | ESISNW |
| 2308 | QSVSSY |
| 2309 | QGIRND |
| 2310 | QGIGND |
| 2311 | QSVSGSY |
| 2312 | QSVSSSY |
| 2313 | QSLLYNFNNENY |
| 2314 | QSLLDSDGKTY |
| 2315 | QSLLDSDGKTY |
| 2316 | QSLLHSNGYNY |
| 2317 | QSVSTY |
| 2318 | QSVSSY |
| 2319 | QDSSKY |
| 2320 | QSVSFTSNNKNY |
| 2321 | QSLLDSDGKTY |
| 2322 | QDISTY |
| 2323 | QSISNY |
| 2324 | QSVVHSDGKTY |
| 2325 | HTISSSY |
| 2326 | ALPKQY |
| 2327 | SSDVGGYNY |
| 2328 | QSISNY |
| 2329 | QSLVYSDGNTY |
| 2330 | KLGDKY |
| 2331 | SSDVGGHDY |
| 2332 | SSDVGGHDY |
| 2333 | QSLVYSDGNTY |
| 2334 | SSNIGNNY |
| 2335 | ALPKQY |
| 2336 | QSVSTY |
| 2337 | QSISSW |
| 2338 | VGHDYFT |
| 2339 | QDSNTY |
| 2340 | NSDVGGYNY |
| 2341 | QSLLHSNGYNY |
| 2342 | QSISSW |
| 2343 | QSLIYSDGNTY |
| 2344 | QSVSSSY |
| 2345 | QGISSW |
| 2346 | KLGDKY |
| 2347 | QSISTW |
| 2348 | QYVGDN |
| 2349 | QYIGDN |
| 2350 | ALPKKY |
| 2351 | QDVSIY |
| 2352 | QSVYDSSNSKNY |
| 2353 | QSVYDTSNSKNY |
| 2354 | QSVSTY |
| 2355 | QSVSSY |
| 2356 | SSNIGAYT |
| 2357 | QSVSSIY |
| 2358 | QSVTSY |
| 2359 | QSITNW |
| 2360 | SSDVGSYNL |
| 2361 | ALPKQY |
| 2362 | QSVSSRY |
| 2363 | QSVSSSY |
| 2364 | QSLLDSDGKTY |
| 2365 | QRVGSS |
| 2366 | QSVSSN |
| 2367 | QGIRFW |
| 2368 | SSNIGAGYD |
| 2369 | QSISSW |
| 2370 | QGISSY |
| 2371 | QSVLYSASNKNY |
| 2372 | QDISNY |
| 2373 | HSLLHSDGKTY |
| 2374 | TGAVTSGHY |
| 2375 | SSDVGGYNY |
| 2376 | QDISNY |
| 2377 | SSDVGGYNY |
| 2378 | SSDVGSYNL |
| 2379 | QSIGKY |
| 2380 | QSIEHSDGNIY |
| 2381 | SSNTGAGYD |
| 2382 | QSLTSSS |
| 2383 | QSLLHGNGYTY |
| 2384 | NIGSKS |
| 2385 | QSVSSSY |
| 2386 | QSVSSK |
| 2387 | TGAVTSGHY |
| 2388 | QSVTRN |
| 2389 | SSNIGSNT |
| 2390 | SSDVGGYNY |
| 2391 | NIGSKN |
| 2392 | SSDVGAYNY |
| 2393 | QSISNY |
| 2394 | QDISNY |
| 2395 | SSNVALNA |
| 2396 | QSVSSN |
| 2397 | SGYSNYK |
| 2398 | SSDVGSYNL |
| 2399 | QHINRW |
| 2400 | QNISRW |
| 2401 | QSLLHSDGKTY |
| 2402 | ALPIKY |
| 2403 | QSVSTY |
| 2404 | ELPKQY |
| 2405 | SSNIGNNY |
| 2406 | QNINVF |
| 2407 | QSLNNNQ |
| 2408 | QSLNNNQ |
| 2409 | SSNIGAGYD |
| 2410 | QSISSH |
| 2411 | QSVASY |
| 2412 | SSNIGSNT |
| 2413 | HSLLHNNGNTY |
| 2414 | ALPKEF |
| 2415 | KLGDKY |
| 2416 | QSVSSSY |
| 2417 | ALSKQY |
| 2418 | QSLLHNNGNTY |
| 2419 | QGIRNS |
| 2420 | QNISRW |
| 2421 | QNISRW |
| 2422 | ALPQRY |
| 2423 | QGVASY |
| 2424 | QNINVF |
| 2425 | QNINVF |
| 2426 | QSLNSN |
| 2427 | SSNIGAGYD |
| 2428 | KLGEKY |
| 2429 | SSNIGAGYD |
| 2430 | ALPKQN |
| 2431 | ETIASW |
| 2432 | KLGDKY |
| 2433 | QSVSSSY |
| 2434 | QSVSSSY |
| 2435 | QSISSSY |
| 2436 | QSVSSSY |
| 2437 | SSDVGSYNL |
| 2438 | SGSIASNY |
| 2439 | SSNIGNNY |
| 2440 | ALPEKY |
| 2441 | SLRSYY |
| 2442 | SSNIGAGYD |
| 2443 | SSNIGNNY |
| 2444 | SSDVGSYNL |
| 2445 | SSNIGNNY |
| 2446 | QGISSY |
| 2447 | QSIRFY |
| 2448 | QSVSSTY |
| 2449 | KLGDNY |
| 2450 | QDISNY |
| 2451 | QDISNY |
| 2452 | QSVSSY |
| 2453 | QGISNW |
| 2454 | QSISSY |
| 2455 | RSNIGAGFD |
| 2456 | QGISSA |
| 2457 | QDMSNY |
| 2458 | SSDVGGYNY |
| 2459 | SLRSYS |
| 2460 | SSDVGDYDY |
| 2461 | SSDVGGYNY |
| 2462 | QSVSSSY |
| 2463 | QSISSY |
| 2464 | QSVSSSY |
| 2465 | QSISSY |
| 2466 | KLGNKY |
| 2467 | SGDVGGYNY |
| 2468 | QSISSC |
| 2469 | QSVSSN |
| 2470 | QSINRN |
| 2471 | QSVNRN |
| 2472 | SGDVGGYNY |
| 2473 | QSISSF |
| 2474 | SSDVGGYNY |
| 2475 | QSISSY |
| 2476 | QSLLHSNGYNY |
| 2477 | QSLLHSNGYNY |
| 2478 | QSISSW |
| 2479 | KLGKKY |
| 2480 | SSNIGAGYD |
| 2481 | TFDVGVYDF |
| 2482 | QSLLHSNGNYY |
| 2483 | NIGSKS |
| 2484 | SSNIGNNY |
| 2485 | QSVSSSY |
| 2486 | QSISSW |
| 2487 | QSISDW |
| 2488 | SSNIGAGYD |
| 2489 | ALPKQY |
| 2490 | QSVSSSY |
| 2491 | NSDINSYDY |
| 2492 | QGISNY |
| 2493 | NIGSKS |
| 2494 | QSISSY |
| 2495 | QSISSW |
| 2496 | NIGSKS |
| 2497 | SSNIGNNY |
| 2498 | SGHSSYV |
| 2499 | QDISNY |
| 2500 | NIGSKS |
| 2501 | QSVSNY |
| 2502 | QDISNY |
| 2503 | QSVSSSY |
| 2504 | QSVSSSY |
| 2505 | TGAVTSGYY |
| 2506 | QGISSY |
| 2507 | QDISNY |
| 2508 | SSDVGSYNL |
| 2509 | SGSIASNY |
| 2510 | QSVSSY |
| 2511 | SSNIGNNY |
| 2512 | RSLVHTNGNTY |
| 2513 | FSDIGNYDL |
| 2514 | QSVSSSY |
| 2515 | SSNIGNNY |
| 2516 | QSVSNY |
| 2517 | QSVSSY |
| 2518 | QSVNSNY |
| 2519 | QGISSS |
| 2520 | SSDVGTYNL |
| 2521 | QSIAKF |
| 2522 | QGISSW |
| 2523 | QGISSA |
| 2524 | NSNIGAGYD |
| 2525 | QIISSW |
| 2526 | HSLVYSDGYTH |
| 2527 | SSNIGSNT |
| 2528 | SSDVGGYNY |
| 2529 | QGISSY |
| 2530 | QDISNY |
| 2531 | QGISSY |
| 2532 | QSISNF |
| 2533 | QDISNY |
| 2534 | QSISSY |
| 2535 | QGISSY |
| 2536 | QDIINY |
| 2537 | QGISSY |
| 2538 | QGISSY |
| 2539 | QSISSY |
| 2540 | QDINKY |
| 2541 | AAS |
| 2542 | AAS |
| 2543 | EVS |
| 2544 | KAS |
| 2545 | AAS |
| 2546 | DAS |
| 2547 | GAS |
| 2548 | RSN |
| 2549 | LSSDGSH |
| 2550 | KDS |
| 2551 | EAA |
| 2552 | DAS |
| 2553 | EVN |
| 2554 | GDQ |
| 2555 | KVS |
| 2556 | KAS |
| 2557 | AAS |
| 2558 | KDS |
| 2559 | WAS |
| 2560 | EDT |
| 2561 | WAS |
| 2562 | WAS |
| 2563 | KAS |
| 2564 | DVS |
| 2565 | KDS |
| 2566 | DVS |
| 2567 | GAS |
| 2568 | GAS |
| 2569 | DAS |
| 2570 | GAS |
| 2571 | SNN |
| 2572 | EVS |
| 2573 | WAS |
| 2574 | GAS |
| 2575 | DAS |
| 2576 | WAS |
| 2577 | AAS |
| 2578 | KGT |
| 2579 | DAS |
| 2580 | AAS |
| 2581 | DAS |
| 2582 | KNN |
| 2583 | ATS |
| 2584 | RNT |
| 2585 | SAS |
| 2586 | ASS |
| 2587 | STS |
| 2588 | ATS |
| 2589 | EDS |
| 2590 | DIN |
| 2591 | GNS |
| 2592 | QDS |
| 2593 | DNN |
| 2594 | GAS |
| 2595 | DTS |
| 2596 | AAS |
| 2597 | DVS |
| 2598 | WAS |
| 2599 | GAS |
| 2600 | DNN |
| 2601 | DVS |
| 2602 | LGS |
| 2603 | LGS |
| 2604 | LGS |
| 2605 | AAS |
| 2606 | AAS |
| 2607 | YDS |
| 2608 | QNN |
| 2609 | DNN |
| 2610 | DVS |
| 2611 | GAS |
| 2612 | AAS |
| 2613 | KAS |
| 2614 | KAS |
| 2615 | GAS |
| 2616 | RND |
| 2617 | WAS |
| 2618 | EDN |
| 2619 | STN |
| 2620 | AAS |
| 2621 | KVS |
| 2622 | DNN |
| 2623 | RNN |
| 2624 | KVS |
| 2625 | KVS |
| 2626 | GAS |
| 2627 | LNS |
| 2628 | EVS |
| 2629 | TAF |
| 2630 | AAS |
| 2631 | GKN |
| 2632 | EKN |
| 2633 | EVS |
| 2634 | GNS |
| 2635 | WAS |
| 2636 | KVS |
| 2637 | DVS |
| 2638 | AAS |
| 2639 | DVS |
| 2640 | AAS |
| 2641 | GKN |
| 2642 | QDT |
| 2643 | KAS |
| 2644 | KIS |
| 2645 | AAS |
| 2646 | GNN |
| 2647 | RNN |
| 2648 | GKN |
| 2649 | DAS |
| 2650 | DNN |
| 2651 | GAS |
| 2652 | QDS |
| 2653 | ATS |
| 2654 | ATS |
| 2655 | ATS |
| 2656 | AAS |
| 2657 | GAS |
| 2658 | KDS |
| 2659 | AAS |
| 2660 | QDN |
| 2661 | EVS |
| 2662 | EVS |
| 2663 | LGS |
| 2664 | EDS |
| 2665 | DVS |
| 2666 | EDS |
| 2667 | KAS |
| 2668 | DAS |
| 2669 | AAS |
| 2670 | GAS |
| 2671 | GAS |
| 2672 | GAS |
| 2673 | WAS |
| 2674 | EVS |
| 2675 | EVS |
| 2676 | LGS |
| 2677 | GSS |
| 2678 | GAS |
| 2679 | DAS |
| 2680 | WAS |
| 2681 | EVS |
| 2682 | DAS |
| 2683 | GAS |
| 2684 | EVS |
| 2685 | AAS |
| 2686 | KDS |
| 2687 | DVS |
| 2688 | AAS |
| 2689 | KVS |
| 2690 | QDS |
| 2691 | DVT |
| 2692 | DVT |
| 2693 | KVS |
| 2694 | DNN |
| 2695 | KDN |
| 2696 | GSS |
| 2697 | ETS |
| 2698 | LEGSGSY |
| 2699 | DAS |
| 2700 | DVS |
| 2701 | LGS |
| 2702 | KAS |
| 2703 | KVS |
| 2704 | GAS |
| 2705 | AAS |
| 2706 | QDS |
| 2707 | KAS |
| 2708 | GAF |
| 2709 | GAS |
| 2710 | EDS |
| 2711 | DAY |
| 2712 | WAS |
| 2713 | WAS |
| 2714 | DAS |
| 2715 | DAS |
| 2716 | STD |
| 2717 | GAS |
| 2718 | GAS |
| 2719 | KAS |
| 2720 | EVS |
| 2721 | KDS |
| 2722 | GAS |
| 2723 | GAS |
| 2724 | EVS |
| 2725 | GAS |
| 2726 | GAS |
| 2727 | AAS |
| 2728 | GNT |
| 2729 | DAS |
| 2730 | AAS |
| 2731 | WAS |
| 2732 | AAS |
| 2733 | ELF |
| 2734 | DTN |
| 2735 | EVS |
| 2736 | DAS |
| 2737 | DVN |
| 2738 | EVS |
| 2739 | AAS |
| 2740 | KIS |
| 2741 | DNS |
| 2742 | GAS |
| 2743 | LGS |
| 2744 | DDS |
| 2745 | GAS |
| 2746 | GAS |
| 2747 | DTS |
| 2748 | GAS |
| 2749 | SNN |
| 2750 | EVS |
| 2751 | DDG |
| 2752 | DVT |
| 2753 | AAS |
| 2754 | DAS |
| 2755 | RDN |
| 2756 | GAS |
| 2757 | VGTGGIVG |
| 2758 | EVS |
| 2759 | EAS |
| 2760 | KAS |
| 2761 | EVS |
| 2762 | EDS |
| 2763 | DAS |
| 2764 | KDR |
| 2765 | DNN |
| 2766 | AAS |
| 2767 | GAS |
| 2768 | GAS |
| 2769 | GNS |
| 2770 | DAS |
| 2771 | DAS |
| 2772 | SNN |
| 2773 | EIS |
| 2774 | KDK |
| 2775 | QDN |
| 2776 | GAS |
| 2777 | KDS |
| 2778 | EIS |
| 2779 | DAS |
| 2780 | KAS |
| 2781 | KAS |
| 2782 | EDT |
| 2783 | AAS |
| 2784 | GAS |
| 2785 | GAS |
| 2786 | GAS |
| 2787 | GNN |
| 2788 | QDT |
| 2789 | GDS |
| 2790 | KDT |
| 2791 | KAS |
| 2792 | QDS |
| 2793 | GAS |
| 2794 | GAS |
| 2795 | GAS |
| 2796 | GAS |
| 2797 | EVS |
| 2798 | EDN |
| 2799 | DNN |
| 2800 | EDN |
| 2801 | GKN |
| 2802 | GNS |
| 2803 | DNN |
| 2804 | EGS |
| 2805 | DNN |
| 2806 | AAS |
| 2807 | AAS |
| 2808 | DAS |
| 2809 | QDT |
| 2810 | DAS |
| 2811 | DAS |
| 2812 | DAS |
| 2813 | AAS |
| 2814 | AAS |
| 2815 | GNS |
| 2816 | DAS |
| 2817 | DAS |
| 2818 | DVS |
| 2819 | VKN |
| 2820 | DVS |
| 2821 | EVS |
| 2822 | GAS |
| 2823 | AAS |
| 2824 | GAS |
| 2825 | AAS |
| 2826 | QDS |
| 2827 | DVY |
| 2828 | AAS |
| 2829 | GAS |
| 2830 | DAS |
| 2831 | DAS |
| 2832 | EVS |
| 2833 | AAS |
| 2834 | DVS |
| 2835 | AAS |
| 2836 | LGS |
| 2837 | LGS |
| 2838 | KAS |
| 2839 | QDV |
| 2840 | GNS |
| 2841 | DDT |
| 2842 | LAS |
| 2843 | YDS |
| 2844 | RNN |
| 2845 | GAS |
| 2846 | KAS |
| 2847 | KAS |
| 2848 | GNS |
| 2849 | KDS |
| 2850 | GAS |
| 2851 | DVD |
| 2852 | AAS |
| 2853 | DDS |
| 2854 | AAS |
| 2855 | KAS |
| 2856 | DDN |
| 2857 | DNN |
| 2858 | LNSDGSH |
| 2859 | DAS |
| 2860 | DDS |
| 2861 | DAS |
| 2862 | DAS |
| 2863 | GAS |
| 2864 | GAS |
| 2865 | STS |
| 2866 | AAS |
| 2867 | DAS |
| 2868 | EVS |
| 2869 | EDN |
| 2870 | DAS |
| 2871 | DNN |
| 2872 | NVS |
| 2873 | EGY |
| 2874 | GAS |
| 2875 | DNN |
| 2876 | GAS |
| 2877 | DAS |
| 2878 | GAS |
| 2879 | SAS |
| 2880 | EVS |
| 2881 | TAS |
| 2882 | AAS |
| 2883 | DAS |
| 2884 | VNT |
| 2885 | KAS |
| 2886 | SVS |
| 2887 | SNN |
| 2888 | EVS |
| 2889 | AAS |
| 2890 | DAS |
| 2891 | AAS |
| 2892 | AAS |
| 2893 | DAS |
| 2894 | AAS |
| 2895 | AAS |
| 2896 | GAS |
| 2897 | AAS |
| 2898 | AAS |
| 2899 | AAS |
| 2900 | DAS |
| 2901 | GLTVSSNY |
| 2902 | GFTVSRNY |
| 2903 | GVIVSSNY |
| 2904 | GFTVSSNY |
| 2905 | GVTVSSNY |
| 2906 | GIIVSSNY |
| 2907 | GIIVSSNY |
| 2908 | GFTVSSNY |
| 2909 | GLTVSSNY |
| 2910 | GLTVSSNY |
| 2911 | GIIVSSNY |
| 2912 | GVTVSRNY |
| 2913 | GITVSSNY |
| 2914 | GFTVSSNY |
| 2915 | GLTVSSNY |
| 2916 | GLTVSSNY |
| 2917 | GLIVSSNY |
| 2918 | GFTVSSNY |
| 2919 | GFIVSSNY |
| 2920 | GFTVSSNY |
| 2921 | GFIVSRNY |
| 2922 | GITVSSNY |
| 2923 | GFTVSSNY |
| 2924 | GFTVSSNY |
| 2925 | GFTVSSNY |
| 2926 | GVTVSSNY |
| 2927 | GFTVSSNY |
| 2928 | GYTFSSYG |
| 2929 | GYSFTYYG |
| 2930 | GFTFSSYD |
| 2931 | GFIVSSNY |
| 2932 | EFIVSRNY |
| 2933 | GFTVSSNY |
| 2934 | GFTVSSNY |
| 2935 | GFTVSFNY |
| 2936 | IYSGGST |
| 2937 | IYSGGTT |
| 2938 | IYSGGTT |
| 2939 | IYSGGST |
| 2940 | IYSGGST |
| 2941 | IYSGGST |
| 2942 | IYSGGST |
| 2943 | IYSGGST |
| 2944 | IYSGGST |
| 2945 | IYSGGST |
| 2946 | IYSGGST |
| 2947 | IYSGGST |
| 2948 | IYSGGST |
| 2949 | IYSGGST |
| 2950 | IYSGGST |
| 2951 | IYSGGST |
| 2952 | IYSGGST |
| 2953 | IYRGGST |
| 2954 | IYSGGST |
| 2955 | IYPGGST |
| 2956 | IYSGGST |
| 2957 | IYSGGST |
| 2958 | IYSGGST |
| 2959 | IYSGGST |
| 2960 | IYSGGST |
| 2961 | VYSGGST |
| 2962 | IYSGGST |
| 2963 | ISGYNGHT |
| 2964 | ISPYNGDT |
| 2965 | IGTAGDT |
| 2966 | IYSGGST |
| 2967 | IYSGGST |
| 2968 | IYSGGST |
| 2969 | IYSGGST |
| 2970 | IYPGGST |
| 2971 | ARDLDYYGMDV |
| 2972 | ARDLVVYGMDV |
| 2973 | ARDLDYYGMDV |
| 2974 | ARDLDYGGGMDV |
| 2975 | ARPIVGARSGMDV |
| 2976 | ARDLGTYGMDV |
| 2977 | ARDLGPYGMDV |
| 2978 | ARDLGAYGMDV |
| 2979 | ARDLYYYGMDV |
| 2980 | ARDLDYYGMDV |
| 2981 | ARDLDYYGMDV |
| 2982 | ARDGYGMDV |
| 2983 | ARGGAYYYGMDV |
| 2984 | ARDLDYMDV |
| 2985 | ARLPYGMDV |
| 2986 | ARLPYGMDV |
| 2987 | ARARIYTYGPDY |
| 2988 | ARVGDSRSWPFEY |
| 2989 | ARAPYSSRSET |
| 2990 | AREIRVITPVEV |
| 2991 | ARGPYPRFDY |
| 2992 | ARERGGRFDY |
| 2993 | ARDRPAAAIRF |
| 2994 | ARDYAGRV |
| 2995 | ARELSYSSSSGVGPKY |
| 2996 | ARLINHYYDSSGDGGAFDI |
| 2997 | ARIGGVAAAGTADGAFDI |
| 2998 | ARERFGISHDY |
| 2999 | AKGVVALTGTLLRLDP |
| 3000 | ARDRDNGSGSYLGWAFDI |
| 3001 | ARDYGDYYFDY |
| 3002 | ARDYGDYYFDY |
| 3003 | ARDYGDYWFDP |
| 3004 | ARSYGDYYFDY |
| 3005 | ARDYGDFYFDY |
| 3006 | QGISSY |
| 3007 | QGISSY |
| 3008 | QGISSY |
| 3009 | QGISSY |
| 3010 | QDINNY |
| 3011 | QGISSY |
| 3012 | QGISSD |
| 3013 | QGISSY |
| 3014 | QGISSY |
| 3015 | QGISSY |
| 3016 | QGISSY |
| 3017 | QGISSY |
| 3018 | QGISSY |
| 3019 | QGISSY |
| 3020 | QDVSKY |
| 3021 | QDIRNY |
| 3022 | QDINNY |
| 3023 | QDISNY |
| 3024 | QDIRNY |
| 3025 | QDINKY |
| 3026 | QDIRNY |
| 3027 | QDISNY |
| 3028 | QDISNY |
| 3029 | QDIRSY |
| 3030 | QDISNY |
| 3031 | SSDVGSYNL |
| 3032 | SSDVGSYNL |
| 3033 | QSVGSN |
| 3034 | QSVRTN |
| 3035 | QSISSY |
| 3036 | QSVSSSY |
| 3037 | QGVSSF |
| 3038 | QSVSSSY |
| 3039 | QGISSY |
| 3040 | QSVSSSY |
| 3041 | AAS |
| 3042 | AAS |
| 3043 | AAS |
| 3044 | AAS |
| 3045 | DAS |
| 3046 | AAS |
| 3047 | AAS |
| 3048 | AAS |
| 3049 | AAS |
| 3050 | AAS |
| 3051 | AAS |
| 3052 | AAS |
| 3053 | AAS |
| 3054 | AAS |
| 3055 | DAS |
| 3056 | DAS |
| 3057 | DAS |
| 3058 | DAS |
| 3059 | DAS |
| 3060 | DAS |
| 3061 | DAS |
| 3062 | DAS |
| 3063 | DAS |
| 3064 | DAS |
| 3065 | DAS |
| 3066 | EVT |
| 3067 | EGS |
| 3068 | GAF |
| 3069 | EAS |
| 3070 | AAS |
| 3071 | GAS |
| 3072 | GAS |
| 3073 | GTS |
| 3074 | AAS |
| 3075 | GAS |
| 3076 | QHLNSYPPIT |
| 3077 | QQLNSYPLT |
| 3078 | QQLNSYGLT |
| 3079 | QQLNSYPHRFT |
| 3080 | QQHDNLPVT |
| 3081 | QQLNSYLYT |
| 3082 | QQLNSDLYT |
| 3083 | QQLNSDLYT |
| 3084 | QQLDSYPL |
| 3085 | QQLNSYLAIT |
| 3086 | QQLNSYPPFT |
| 3087 | QQLNSYPPA |
| 3088 | QQLNTYPPFG |
| 3089 | QQLNSYPPMYT |
| 3090 | QQYDNLPVT |
| 3091 | QQYDNLPIT |
| 3092 | QQYDNLPPV |
| 3093 | QQYDNLPLFT |
| 3094 | QQYDNLPIT |
| 3095 | HQYDNLPRT |
| 3096 | QQYDNLPVT |
| 3097 | QQHDNLPSFT |
| 3098 | QQYDNLPPA |
| 3099 | QQYDNLPQT |
| 3100 | QQYDNLPPT |
| 3101 | CSYAGSSTWV |
| 3102 | CSYAGSSTWV |
| 3103 | QQYNNWYT |
| 3104 | QQYNNWPPIT |
| 3105 | QQSYSMPPVT |
| 3106 | QQYGSTPRT |
| 3107 | QQYGSSPRT |
| 3108 | QQYGSSPRT |
| 3109 | QQLNS |
| 3110 | QQYDSSPRT |
| 3111 | EVQLVESGGGLIQPGGSLRLSCAASGLTVSSNYMS |
| | WVRQAPGKGLEWVSVIYSGGSTYYADSVKGRFTIS |
| | RDNSTNTLYLQMNSLRAEDTAVYYCARDLDYYGMD |
| | VWGQGTTVTVSS |
| 3112 | EVQLVESGGGLVQPGGSLRLSCAASGFTVSRNYMS |
| | WVRQAPGKGLEWVSVIYSGGTTHYADSVKGRFTIS |
| | RHNSKNTLYLQMNSLRAEDTAVYYCARDLVVYGMD |
| | VWGQGTTVTVSS |
| 3113 | EVQLVESGGGLVQPGGSLRLSCAASGVIVSSNYMR |
| | WVRQAPGKGLEWVSVIYSGGTTYYADSVKGRFTIS |
| | RHNSKNTLYLQMNSLRTEDTAVYYCARDLDYYGMD |
| | VWGQGTTVTVSS |
| 3114 | EVQLVESGGGLVQPGGSLRLSCAASGFTVSSNYMS |
| | WVRQAPGKGLEWVSVIYSGGSTYYADSVKGRFTIS |
| | RHNSKNTLYLQMNSLRAEDTAVYYCARDLDYGGGM |
| | DVWGQGTTVTVSS |
| 3115 | EVQLVESGGGLIQPGGSLRLSCAASGVTVSSNYMS |
| | WVRQAPGKGLEWVSLIYSGGSTYYADSVKGRFTIS |
| | RDNSKNTLYLQMNSLRAEDTAVYYCARPIVGARSG |
| | MDVWGQGTTVTVSS |
| 3116 | EVQLVESGGGLIQPGGSLRLSCAASGIIVSSNYMS |
| | WVRQAPGKGLEWVSVIYSGGSTFYADSVKGRFTIS |
| | RDNSKNTLYLQMNTMRAEDTAVYYCARDLGTYGMD |
| | VWGQGTTVTVS |
| 3117 | EVQLVESGGGLIQPGGSLRLSCAASGIIVSSNYMT |
| | WVRQAPGKGLEWVSVIYSGGSTFYADSVKGRFTIS |
| | RDNSKNTLYLQMSSLRAEDTAVYYCARDLGPYGMD |
| | VWGQGTTVTVSS |
| 3118 | EVQLVESGGGLIQPGGSLRLSCAASGFTVSSNYMS |
| | WVRQAPGKGLEWVSVIYSGGSTFYADSVKGRFTIS |
| | RDNSKNTLYLQMNSLRAEDTAVYYCARDLGAYGMD |
| | VWGQGTTVTVSS |
| 3119 | EVQLVESGGGLIQPGGSLRLSCAASGLTVSSNYMS |
| | WVRQAPGKGLEWVSVIYSGGSTFYADSVKGRFTIS |
| | RDNSKNTLYLQMNSLRAEDTAVYYCARDLYYYGMD |
| | VWGQGTTVTVSS |
| 3120 | EVQLVESGGGLIQPGGSLRLSCAASGLTVSSNYMS |
| | WVRQAPGKGLEWVSVIYSGGSTYYADSVKGRFTIS |
| | RDNSKNTLYLQMNSLRAEDTAVYYCARDLDYYGMD |
| | VWGQGTTVTVSS |
| 3121 | EVQLVESGGGLVQPGGSLRLSCAASGIIVSSNYMS |
| | WVRQAPGKGLEWVSVIYSGGSTYYADSVKGRFTIS |
| | RDNSKNTLYLQMNSLRAEDTAVYYCARDLDYYGMD |
| | VWGQGTTVTVSS |
| 3122 | EVQLVESGGGLVQPGGSLRLSCAASGVTVSRNYMS |
| | WVRQAPGKGLEWVSVIYSGGSTDYADSVKGRFTIS |
| | RHNSKNTLYLQMNSLRVEDTAVYYCARDGYGMDVW |
| | GQGTTVTVSS |
| 3123 | EVQLVESGGGLIQPGGSLRLSCAASGITVSSNYMS |
| | WVRQAPGKGLEWVSVIYSGGSTYYADSVKGRFTIS |
| | RDNSKNTLYLQMNSLRAEDTAVYYCARGGAYYYGM |
| | DVWGQGTTVTVSS |
| 3124 | EVQLVESGGGLVQPGGSLRLSCAASGFTVSSNYMS |
| | WVRQAPGKGLEWVSVIYSGGSTYYADSVKGRFTIS |
| | RDNSKNTLYLQMNSLRAEDTAVYYCARDLDYMDVW |
| | GKGTTVTVSS |
| 3125 | EVQLVESGGGLVQPGGSLRLSCAASGLTVSSNYMS |
| | WVRQAPGKGLEWVSVIYSGGSTFYADSVKGRFTIS |
| | RDNSKNTLYLQMNSVRAEDTAVYYCARLPYGMDVW |
| | GQGTTVTVSS |
| 3126 | EVQLVESGGGLVQPGGSLRLSCAASGLTVSSNYMS |
| | WVRQAPGKGLNWVSVIYSGGSTYYADSVKGRFTIS |
| | RDNSKNTLYLEMNSLKPEDTAVYYCARLPYGMDVW |
| | GQGTTVTVSS |
| 3127 | QVQLVESGGGLVQPGGSLRLSCAASGLIVSSNYMS |
| | WVRQAPGEGLEWVSVIYSGGSTYYADSVKGRFTIS |
| | RDTSKNTLYLQMNSLRAEDTAVYYCARARIYTYGP |
| | DYWGQGTLVTVSS |
| 3128 | EVQLVESGGGLVQPGGSLRLSCAASGFTVSSNYMS |
| | WVRQAPGRGLEWVSVIYRGGSTYYADSVKGRFSIS |
| | RDNSKNTLYLQMNSLRVEDTAVYYCARVGDSRSWP |
| | FEYWGQGTLVTVSS |
| 3129 | EVQLVESGGGLVQPGGSLRLSCAASGFIVSSNYMS |
| | WVRQAPGKGLEWVSVIYSGGSTYYADSVKGRFTIS |
| | RDNSKNTLYLRMNSLRAEDTAVYYCARAPYCSSRS |
| | CETWGQGTLVTVSS |
| 3130 | EVQLVESGGGLVQPGGSLRLSCAASGFTVSSNYMS |
| | WVRQAPGKGLEWVSLIYPGGSTYYADSVEGRFTIS |
| | RDNSKNTLYLQMNSLRAEDTAVYYCAREIRVITPV |
| | EVWGQGTLVTVSS |
| 3131 | EVQLVESGGGLVQPGGSLRLSCAVSGFIVSRNYMT |
| | WVRQAPGKGLEWVSLIYSGGSTFYTNSVKGRFTIS |
| | RDNSKNTLYLQMDSLRAEDTAVYYCARGPYPRFDY |
| | WGQGTLVTVSS |
| 3132 | EVQLVESGGGLIQPGGSLRLSCAASGITVSSNYMS |
| | WVRQAPGKGLEWVSVIYSGGSTFYSDSVKGRFTIS |
| | RDNSKNTLYLQMNSLRAEDTAVYYCARERGGRFDY |
| | WGQGTLVTVSS |
| 3133 | EVQLVESGGGLVQPGGSLRLSCAASGFTVSSNYMS |
| | WVRQAPGKGLEWVSLIYSGGSTYYADSVKGRFTIS |
| | RDNSKNTLYLQMNSLRAEDTAVYYCARDRPAAAIR |
| | FGQGTLVTVSS |
| 3134 | EVQLVESGGGLVQPGGSLRLSCAASGFTVSSNYMS |
| | WVRQAPGKGLEWVSIIYSGGSTYYADSVKGRFTIS |
| | RDNSKNTLYLQMNSLRAEDTAVYYCARDYAGRVWG |
| | QGTLVTVSS |
| 3135 | EVQLVESGGGLVQPGGSLRLSCAASGFTVSSNYMS |
| | WVRQAPGKGLEWVSVIYSGGSTYYADSVKGRFTIS |
| | RDNSKNTLYLQMNSLRAEDTAVYYCARELSYSSSS |
| | GVGPKYWGQGTLVTVSS |
| 3136 | EVQLVESGGGLVQPGGSLRLSCAASGVTVSSNYMS |
| | WVRQAPGKGLEWVSAVYSGGSTYYADSVKGRFTIS |
| | RHNSKNTLYLQMKSLRPEDTAIYYCARLINHYYDS |
| | SGDGGAFDIWGQGTMVTVSS |
| 3137 | EVQLVESGGGLVQPGGSLRLSCAASGFTVSSNYMS |
| | WVRQAPGKGLEWVSVIYSGGSTYYADSVKGRFTIS |
| | RDNSKNTLYLQMNSLRAEDTAVYYCARIGGVAAAG |
| | TADGAFDIWGQGTMVTVSS |
| 3138 | QVQLVQSGAEVKKPGASVKVSCKTSGYTFSSYGLS |
| | WVRQAPGQGLEWMGWISGYNGHTVNAQNFQDRVTM |
| | TTDTSTDTAYMELRSLRSDDTALYFCARERFGISH |
| | DYWGQGTLVIVSS |
| 3139 | QIQLVQSGPEVKRPGASVKVSCKASGYSFTYYGIS |
| | WVRQAPGQGLEWMGWISPYNGDTKFAQKFQDRVIL |
| | TTDTSTSTAYMELKSLRSDDTAVYYCAKGVVALTG |
| | TLLRLDPWGQGTLVTVSS |
| 3140 | EVQLVESGGGLVQPGGSLRLSCAASGFTFSSYDMH |
| | WVRQATGKGLEWVSVIGTAGDTYYPGSVKGRFTIS |
| | RENAKNSLYLQMNSLRAGDTAVYYCARDRDNGSGS |
| | YLGWAFDIWGQGTMVTVSS |
| 3141 | EVQLVESGGGLIQPGGSLRLSCAASGFIVSSNYMS |
| | WVRQAPGKGLEWVSVIYSGGSTYYADSVKGRFTIS |
| | RDNSKNTLYLQMNSLRAEDTAVYYCARDYGDYYFD |
| | YWGQGTLVTVSS |
| 3142 | EVQLVESGGGLIQPGGSLRLSCAASEFIVSRNYMS |
| | WVRQAPGKGLEWVSVIYSGGSTYYADSVKGRFTIS |
| | RDNSKNTLNLQMNSLRAEDTAVYYCARDYGDYYFD |
| | YWGQGTLVTVSS |
| 3143 | EVQLVESGGGLIQPGGSLRLSCAASGFTVSSNYMS |
| | WVRQAPGKGLEWVSVIYSGGSTYYADSVKGRFTIS |
| | RDNSKNTLYLQMNSLRAEDTAVYYCARDYGDYWFD |
| | PWGQGTLVTVSS |
| 3144 | EVQLVESGGGLIQPGGSLRLSCAASGFTVSSNYMS |
| | WVRQAPGKGLEWVSVIYSGGSTYYADSVKGRFTIS |
| | RDNSKNTLYLQMNSLRAEDTAVYYCARSYGDYYFD |
| | YWGQGTLVTVSS |
| 3145 | EVQVVESGGGLVQPGGSLRLSCAASGFTVSFNYMS |
| | WVRQAPGKGLEWVSVIYPGGSTYYADSVKGRFTIS |
| | RHNSKNTVYLQMNSLRAEDTAVYYCARDYGDFYFD |
| | YWGQGTLVTVSS |
| 3146 | DIQLTQSPSSLSASVGDRVTITCRASQGISSYLAW |
| | YQQKPGKAPNLLIYAASTLQSGVPSRFSGSGSGTD |
| | FTLTISSLQPEDFATYYCQHLNSYPPITFGQGTRL |
| | EIK |
| 3147 | DIQLTQSPSFLSASVGDRVTITCRASQGISSYLAW |
| | YQQKPGKAPKLLIYAASTLQSGVPSSFSGSGSGTE |
| | FTLTISSLQPEDFATYYCQQLNSYPLTFGGGTKVE |
| | IK |
| 3148 | DIQLTQSPSSLSASVGDRVTITCRASQGISSYLAW |
| | YQQKPGKAPKLLIYAASTLQRGVPSRFSGSGSGTD |
| | FNLTISSLQPEDFGTYYCQQLNSYGLTFGGGTKVE |
| | IK |
| 3149 | DIQLTQSPSFLSASVGDRVTITCRASQGISSYLAW |
| | YQQKPGKAPKLLIYAASTLQSGVPSRFSGSGSGTE |
| | FTLTISSLQPEDFATYYCQQLNSYPHRFTFGPGTK |
| | VDIK |
| 3150 | DIQMTQSPSSLSASVGDRVTITCQASQDINNYLNW |
| | YQQKPGKAPKLLIYDASNLETGVPSRFSGSGSGTD |
| | FTFIISSLQPEDIATYYCQQHDNLPVTFGGGTKVE |
| | IK |
| 3151 | DIQLTQSPSFLSASVGDRVTITCRASQGISSYLAW |
| | YEQKPGKAPKLLIYAASTLQSGVPSRFSGSGSGTE |
| | FTLTISTLQPGDFATYYCQQLNSYLYTFGQGTKLE |
| | IK |
| 3152 | DIQLTQSPSFLSASVGDRVTITCRASQGISSDLAW |
| | YQQKPGKAPNLLIYAASTLQSGVPSRFSGSGSGTE |
| | FTLTISSLQPEDFATYYCQQLNSDLYTFGQGTKLE |
| | IK |
| 3153 | DIQLTQSPSFLSASVGDRVTITCRASQGISSYLAW |
| | YQQKPGKAPKLLIYAASTLQSGVPSRFSGSGSGTE |
| | FTLTISSLQPEDFATYYCQQLNSDLYTFGQGTKLE |
| | IK |
| 3154 | AIQLTQSPSSLSASVGDRVTITCRASQGISSYLAW |
| | YQQKPGKAPKLLIFAASTLQSGVPSRFSGSGSGTD |
| | FTLTISSLQPEDFATYYCQQLDSYPLFGGGTKVEI |
| | K |
| 3155 | AIQLTQSPSSLSASVGDRVTITCRASQGISSYLAW |
| | YQQKPGKAPKLLIYAASTLQSGVPSRFSGSGSGTD |
| | FTLTISSLQPEDFATYYCQQLNSYLAITFGQGTRL |
| | EIK |
| 3156 | DIQLTQSPSFLSASVGDRVTITCRASQGISSYLAW |
| | YQQKPGKAPKLLIYAASTLQSGVPSRFSGSGSGTE |
| | FTLTISSLQPEDFATYYCQQLNSYPPFTFGPGTKV |
| | DIK |
| 3157 | DIQLTQSPSFLSASVGDRVTITCRASQGISSYLAW |
| | YQQKPGKAPNLLIYAASTLQSGVPSRFSGSGSGTE |
| | FTLTISSLQPEDFATYYCQQLNSYPPAFGPGTKVD |
| | IK |
| 3158 | DIQLTQSPSFLSASVGDRVTITCRASQGISSYLAW |
| | YQQKPGKAPKLLIYAASTLQSGVPSRFSGSGSGTE |
| | FTLTISSLQPEDFATYYCQQLNTYPPFGFGPGTKV |
| | DIK |
| 3159 | DIQLTQSPSSLSASVGDRVTITCRASQGISSYLAW |
| | YQQKPGKAPKLLIYAASTLQSGVPSRFSGSGSGTD |
| | FTLTISSLQPEDFATYYCQQLNSYPPMYTFGQGTK |
| | LEIK |
| 3160 | DIQMTQSPSSLSASVGDRVTITCQASQDVSKYLNW |
| | YQQKPGKAPKLLIHDASNLQTGVPSRFSGGGSGTD |
| | FTFTISSLQPEDIATYYCQQYDNLPVTFGGGTKVE |
| | IK |
| 3161 | DIQMTQSPSSLSASVGDRVTITCQASQDIRNYLNW |
| | YQQKPGKAPKLLIHDASNLETGVPSRFIGSGSGTD |
| | FTFTISSLQPEDIATYYCQQYDNLPITFGQGTRLE |
| | IK |
| 3162 | DIQMTQSPSSLSASVGDRVTITCQASQDINNYLNW |
| | YQQKPGKAPKLLIYDASNLETGVPSRFSGSGSGTD |
| | FTFTISSLQPEDIATYYCQQYDNLPPVFGPGTKVD |
| | IK |
| 3163 | DIQMTQSPSSLSASVGDRVTITCQASQDISNYLNW |
| | YQQKPGKAPKLLIYDASNLETGVPSRFSGSGSGTD |
| | FTFTISSLQPEDIATYYCQQYDNLPLFTFGPGTKV |
| | DIK |
| 3164 | DIQMTQSPSSLSASVGDRVTITCQASQDIRNYLNW |
| | YQQKPGKAPNLLIYDASNLETGVPSRFSGSGSGTD |
| | FTFTINSLQPEDIATYYCQQYDNLPITFGQGTRLE |
| | IK |
| 3165 | DIQMTQSPSSLSASVGDRVTITCQASQDINKYLNW |
| | YQLKPGKAPNLLIYDASNLETGVPSRFSGSGSGTD |
| | FTFTISSLQPEDIATYYCHQYDNLPRTFGQGTKVE |
| | IK |
| 3166 | DIQMTQSPSSLSASLGDRVTITCQASQDIRNYLNW |
| | YQQKPGKAPKLLIYDASNLETGVPSRFSGSGSGTD |
| | FTFTISSLQPEDIATYYCQQYDNLPVTFGGGTKVE |
| | IK |
| 3167 | DIQMTQSPSSLSASVGDRVTITCQASQDISNYLNW |
| | YQQKPGKAPKLLIYDASTLETGVPSRFSGSGSGTD |
| | FTFTISSLQPEDIATYYCQQHDNLPSFTFGPGTKV |
| | DIK |
| 3168 | DIQMTQSPSSLSASVGDRVTITCQASQDISNYLNW |
| | YQQKPGKAPKLLIYDASNLETGVPSRFSGSGSGTD |
| | FTFTISSLQPEDIATYYCQQYDNLPPAFGGGTKVE |
| | IK |
| 3169 | DIQMTQSPSSLSASVGDRVTITCQASQDIRSYLNW |
| | YQQKPGKAPKLLIYDASNLETGVASRFSGSGSGTD |
| | FTFTISSLQPEDIATYYCQQYDNLPQTFGQGTKLE |
| | IK |
| 3170 | DIQMTQSPSSLSASVGDRVTITCQASQDISNYLNW |
| | YQQKPGKAPKLLIYDASNLETGVPSRFSGSGSGTD |
| | FTFTISSLQPEDIATYYCQQYDNLPPTFGGGTKVE |
| | IK |
| 3171 | QSALTQPASVSGSPGQSITISCTGTSSDVGSYNLV |
| | SWYQQRPGKAPKLILYEVTKRPSGVSNRFSGSKSG |
| | NTASLAISGLQAEDEADYYCCSYAGSSTWVFGGGT |
| | KLTVL |
| 3172 | QSALTQPASVSGSPGQSITISCTGTSSDVGSYNLV |
| | SWYQQHPGKAPKLMIYEGSKRPSGVSNRFSGSKSG |
| | NTASLTISGLQAEDEADYYCCSYAGSSTWVFGGGT |
| | KLTVL |
| 3173 | EIVMTQFPATLSVSPGERATLFCRASQSVGSNLAW |
| | YQQKPGQAPRLLIYGAFTRATGVPARFSGSGSGSE |
| | FSLTISSLQSEDFAVYYCQQYNNWYTFGQGTKLEI |
| | K |
| 3174 | EIVMTQSPATLSVSPGERATLSCRASQSVRTNLAW |
| | YQQKRGQAPRLLIYEASTRATGVPDRFSGSGSGTE |
| | FTLTISSLQSEDFAVYYCQQYNNWPPITFGQGTRL |
| | DIK |
| 3175 | DIQMTQSPSSLSASVGDRVTITCRASQSISSYLNW |
| | YQQKPGKAPKLLIYAASSLQSGVPSRFSASGSGTD |
| | FTLTISSLQPEDFATYYCQQSYSMPPVTFGQGTKV |
| | EIK |
| 3176 | EIVLTQSPGTLSLSPGERATLSCRASQSVSSSYLA |
| | WYQQKPGQAPRLLIYGASSRATGIPERFSGSGSGT |
| | DFTLTISRLEPEDFAVYYCQQYGSTPRTFGQGTKV |
| | EIK |
| 3177 | EIVLTQSPGTLSLSPGERATLSCRASQGVSSFLAW |
| | YQQKPGQAPRLLIHGASSRATGIPDRFSGSGSGTD |
| | FTLTITRLEPEDFAVYYCQQYGSSPRTFGQGTKVE |
| | IK |
| 3178 | EIVLTQSPGTLSLSPGERATLSCRASQSVSSSYLA |
| | WYQQKPGQAPRLLIYGTSSRATGIPDRFSGSGSGT |
| | DFTLTISRLEPEDFAVYYCQQYGSSPRTFGQGTKV |
| | EIK |
| 3179 | DIQLTQSPSSLSASVGDRVTITCRASQGISSYLAW |
| | YQQKPGKAPKLLIYAASTLQSGVPSRFSGSGSGTD |
| | FTLTISSLQPEDFATYYCQQLNSFGPGTKVDIK |
| 3180 | EIVLTQSPGTLSLSPGERATLSCRASQSVSSSYLA |
| | WYQQKPGQAPRLLIYGASSRATGIPDRFSGSGSGT |
| | DFTLTISRLEPEDFAMYYCQQYDSSPRTFGQGTKV |
| | EIK |

[0233] Although the specific embodiments described herein have been described in detail, a person skilled in the art would understand that: Various modifications and changes in the details can be made according to all the teachings disclosed and these changes are within the scope of the protection of the present invention. All of the present invention are given by the appended claims and any equivalents thereof

What is claimed is:

1. An antigen-binding unit comprising a heavy chain variable region (VH) and a light chain variable region (VL), wherein the heavy chain variable region comprises VH CDR1, VH CDR2 and VH CDR3, and the light chain variable region comprises VL CDR1, VL CDR2 and VL CDR3, wherein the VH CDR3 comprises a sequence selected from SEQ ID NOs: 1-360 and 2971-3005 or a sequence comprising one or more amino acid additions, deletions, or substitutions compared with SEQ ID NOs: 1-360 and 2971-3005, and/or wherein the VL CDR3 comprises a sequence selected from SEQ ID NOs: 361-720 and 3076-3110 or a sequence comprising one or more amino acid additions, deletions, or substitutions compared with SEQ ID NOs: 361-720 and 3076-3110.

2. The antigen-binding unit of any one of the preceding claims, wherein the antigen-binding unit binds to a receptor binding domain (RBD) of an S protein of a novel coronavirus (SARS-CoV-2) with an equilibrium dissociation constant (KD) of less than 100 nM, less than 50 nM, less than 20 nM, less than 15 nM, less than 10 nM, less than 5 nM, less than 4 nM, less than 3 nM, less than 2 nM, less than 1 nM, less than 0.5 nM, less than 0.1 nM, less than 0.05 nM, or less than 0.01 nM.

3. The antigen-binding unit of any one of the preceding claims, wherein the antigen-binding unit neutralizes the novel coronavirus (SARS-CoV-2) with an IC₅₀ of less than 20 μg/ml, less than 10 μg/ml, less than 9 μg/ml, less than 8 μg/ml, less than 7 μg/ml, less than 6 μg/ml, less than 5 μg/ml, less than 4 μg/ml, less than 3 μg/ml, less than 2 μg/ml, less than 1 μg/ml, less than 0.5 μg/ml, less than 0.25 μg/ml, less than 0.2 μg/ml, less than 0.1 μg/ml, less than 0.05 μg/ml, or less than 0.001 μg/ml.

4. The antigen-binding unit of any one of the preceding claims, wherein the VH CDR1 comprises a sequence selected from SEQ ID NOs: 1461-1820 and 2901-2935 or a sequence comprising one or more amino acid additions, deletions, or substitutions compared with SEQ ID NOs: 1461-1820 and 2901-2935.

5. The antigen-binding unit of any one of the preceding claims, wherein the VH CDR1 comprises a sequence selected from SEQ ID NOs: 1461-1820 and 2901-2935.

6. The antigen-binding unit of any one of the preceding claims, wherein the VH CDR1 comprises a sequence comprising 5, 4, 3, 2 or 1 amino acid additions, deletions, or substitutions compared with SEQ ID NOs: 1461-1820 and 2901-2935.

7. The antigen-binding unit of any one of the preceding claims, wherein the VH CDR1 comprises the same sequence as CDR1 contained in SEQ ID NOs: 721-1080 and 3111-3145.

8. The antigen-binding unit of any one of the preceding claims, wherein the VH CDR2 comprises a sequence selected from SEQ ID NOs: 1821-2180 and 2936-2970 or a sequence comprising one or more amino acid additions, deletions, or substitutions compared with SEQ ID NOs: 1821-2180 and 2936-2970.

9. The antigen-binding unit of any one of the preceding claims, wherein the VH CDR2 comprises a sequence selected from SEQ ID NOs: 1821-2180 and 2936-2970.

10. The antigen-binding unit of any one of the preceding claims, wherein the VH CDR2 comprises a sequence comprising 5, 4, 3, 2 or 1 amino acid additions, deletions, or substitutions compared with SEQ ID NOs: 1821-2180 and 2936-2970.

11. The antigen-binding unit of any one of the preceding claims, wherein the VH CDR2 comprises the same sequence as CDR2 contained in SEQ ID NOs: 721-1080 and 3111-3145.

12. The antigen-binding unit of any one of the preceding claims, wherein the VL CDR1 comprises a sequence selected from SEQ ID NOs: 2181-2540 and 3006-3040 or a sequence comprising one or more amino acid additions, deletions, or substitutions compared with SEQ ID NOs: 2181-2540 and 3006-3040.

13. The antigen-binding unit of any one of the preceding claims, wherein the VL CDR1 comprises a sequence selected from SEQ ID NOs: 2181-2540 and 3006-3040.

14. The antigen-binding unit of any one of the preceding claims, wherein the VL CDR1 comprises a sequence comprising 5, 4, 3, 2 or 1 amino acid additions, deletions, or substitutions compared with SEQ ID NOs: 2181-2540 and 3006-3040.

15. The antigen-binding unit of any one of the preceding claims, wherein the VL CDR1 comprises the same sequence as CDR1 contained in SEQ ID NOs: 1081-1440 and 3146-3180.

16. The antigen-binding unit of any one of the preceding claims, wherein the VL CDR2 comprises a sequence selected from SEQ ID NOs: 2541-2900 and 3041-3075 or a sequence comprising one or more amino acid additions, deletions, or substitutions compared with SEQ ID NOs: 2541-2900 and 3041-3075.

17. The antigen-binding unit of any one of the preceding claims, wherein the VL CDR2 comprises a sequence selected from SEQ ID NOs: 2541-2900 and 3041-3075.

18. The antigen-binding unit of any one of the preceding claims, wherein the VL CDR2 comprises a sequence comprising 5, 4, 3, 2 or 1 amino acid additions, deletions, or substitutions compared with SEQ ID NOs: 2541-2900 and 3041-3075.

19. The antigen-binding unit of any one of the preceding claims, wherein the VL CDR2 comprises the same sequence as CDR2 contained in SEQ ID NOs: 1081-1440 and 3146-3180.

20. The antigen-binding unit of any one of the preceding claims, wherein the VH comprises a sequence selected from SEQ ID NOs: 721-1080 and 3111-3145 or a sequence comprising one or more amino acid additions, deletions, or substitutions compared with SEQ ID NOs: 721-1080 and 3111-3145.

21. The antigen-binding unit of any one of the preceding claims, wherein the VH comprises a sequence selected from SEQ ID NOs: 721-1080 and 3111-3145.

22. The antigen-binding unit of any one of the preceding claims, wherein the VH comprises a sequence comprising 10, 9, 8, 7, 6, 5, 4, 3, 2 or 1 amino acid additions, deletions, or substitutions compared with SEQ ID NOs: 721-1080 and 3111-3145.

23. The antigen-binding unit of any one of the preceding claims, wherein the VH comprises a sequence having at least 80%, 85%, 90%, 91%, 92%, 93%, 94%, 95%, 96%, 97%, 98%, 99% or 99% identity to a sequence selected from SEQ ID NOs: 721-1080 and 3111-3145.

24. The antigen-binding unit of any one of the preceding claims, wherein the VL comprises a sequence selected from SEQ ID NOs: 1081-1440 and 3146-3180 or a sequence comprising one or more amino acid additions, deletions, or substitutions compared with SEQ ID NOs: 1081-1440 and 3146-3180.

25. The antigen-binding unit of any one of the preceding claims, wherein the VL comprises a sequence selected from SEQ ID NOs: 1081-1440 and 3146-3180.

26. The antigen-binding unit of any one of the preceding claims, wherein the VL comprises a sequence comprising 10, 9, 8, 7, 6, 5, 4, 3, 2 or 1 amino acid additions, deletions, or substitutions compared with SEQ ID NOs: 1081-1440 and 3146-3180.

27. The antigen-binding unit of any one of the preceding claims, wherein the VL comprises a sequence having at least 80%, 85%, 90%, 91%, 92%, 93%, 94%, 95%, 96%, 97%, 98%, 99% or 99% identity to a sequence selected from SEQ ID NOs: 1081-1440 and 3146-3180.

28. An antigen-binding unit comprising a heavy chain variable region (VH) and a light chain variable region (VL), wherein the heavy chain variable region comprises VH CDR1, VH CDR2 and VH CDR3, and the light chain variable region comprises VL CDR1, VL CDR2 and VL CDR3, wherein the VH CDR1 comprises a sequence selected from SEQ ID NOs: 1461-1820 and 2901-2935, a sequence comprising one or more amino acid additions, deletions, or substitutions compared with SEQ ID NOs: 1461-1820 and 2901-2935, or the same sequence as CDR1 contained in SEQ ID NOs: 721-1080 and 3111-3145, wherein the VH CDR2 comprises a sequence selected from SEQ ID NOs: 1821-2180 and 2936-2970, a sequence comprising one or more amino acid additions, deletions, or substitutions compared with SEQ ID NOs: 1821-2180 and 2936-2970, or the same sequence as CDR2 contained in SEQ ID NOs: 721-1080 and 3111-3145, and wherein the VH CDR3 comprises a sequence selected from SEQ ID NOs: 1-360 and 2971-3005, a sequence comprising one or more amino acid additions, deletions, or substitutions compared with SEQ ID NOs: 1-360 and 2971-3005, or the same sequence as CDR3 contained in SEQ ID NOs: 721-1080 and 3111-3145, and/or wherein the VL CDR1 comprises a sequence selected from SEQ ID NOs: 2181-2540 and 3006-3040, a sequence comprising one or more amino acid additions, deletions, or substitutions compared with SEQ ID NOs: 2181-2540 and 3006-3040, or the same sequence as CDR1 contained in SEQ ID NOs: 1081-1440 and 3146-3180, the VL CDR2 comprises a sequence selected from SEQ ID NOs: 2541-2900 and 3041-3075, a sequence comprising one or more amino acid additions, deletions, or substitutions compared with SEQ ID NOs: 2541-2900 and 3041-3075, or the same sequence as CDR2 contained in SEQ ID NOs: 1081-1440 and 3146-3180, and the VL CDR3 comprises a sequence selected from SEQ ID NOs: 361-720 and 3076-3110, a sequence comprising one or more amino acid additions, deletions, or substitutions compared with SEQ ID NOs: 361-720 and 3076-3110, or the same sequence as CDR3 contained in SEQ ID NOs: 1081-1440 and 3146-3180.

29. An antigen-binding unit comprising a heavy chain variable region (VH) and a light chain variable region (VL), wherein the heavy chain variable region comprises VH CDR1, VH CDR2 and VH CDR3, and the light chain variable region comprises VL CDR1, VL CDR2 and VL CDR3, wherein the VH CDR1 comprises a sequence selected from SEQ ID NOs: 1461-1820 and 2901-2935 or a sequence comprising one or more amino acid additions, deletions, or substitutions compared with SEQ ID NOs: 1461-1820 and 2901-2935, wherein the VH CDR2 comprises a sequence selected from SEQ ID NOs: 1821-2180 and 2936-2970 or a sequence comprising one or more amino acid additions, deletions, or substitutions compared with SEQ ID NOs: 1821-2180 and 2936-2970, and wherein the VH CDR3 comprises a sequence selected from SEQ ID NOs: 1-360 and 2971-3005 or a sequence comprising one or more amino acid additions, deletions, or substitutions compared with SEQ ID NOs: 1-360 and 2971-3005, and/or wherein the VL CDR1 comprises a sequence selected from SEQ ID NOs: 2181-2540 and 3006-3040 or a sequence comprising one or more amino acid additions, deletions, or substitutions compared with SEQ ID NOs: 2181-2540 and 3006-3040, the VL CDR2 comprises a sequence selected from SEQ ID NOs: 2541-2900 and 3041-3075 or a sequence comprising one or more amino acid additions, deletions, or substitutions compared with SEQ ID NOs: 2541-2900 and 3041-3075, and the VL CDR3 comprises a sequence selected from SEQ ID NOs: 361-720 and 3076-3110 or a sequence comprising one or more amino acid additions, deletions, or substitutions compared with SEQ ID NOs: 361-720 and 3076-3110.

30. The antigen-binding unit of any one of the preceding claims, wherein the VH comprises a sequence selected from SEQ ID NOs: 721-1080 and 3111-3145 or a sequence comprising one or more amino acid additions, deletions, or substitutions compared with SEQ ID NOs: 721-1080 and 3111-3145.

31. The antigen-binding unit of any one of the preceding claims, wherein the VH comprises a sequence selected from SEQ ID NOs: 721-1080 and 3111-3145.

32. The antigen-binding unit of any one of the preceding claims, wherein the VH comprises a sequence comprising 10, 9, 8, 7, 6, 5, 4, 3, 2 or 1 amino acid additions, deletions, or substitutions compared with SEQ ID NOs: 721-1080 and 3111-3145.

33. The antigen-binding unit of any one of the preceding claims, wherein the VH comprises a sequence having at least 80%, 85%, 90%, 91%, 92%, 93%, 94%, 95%, 96%, 97%, 98%, 99% or 99% identity to a sequence selected from SEQ ID NOs: 721-1080 and 3111-3145.

34. The antigen-binding unit of any one of the preceding claims, wherein the VL comprises a sequence selected from SEQ ID NOs: 1081-1440 and 3146-3180 or a sequence comprising one or more amino acid additions, deletions, or substitutions compared with SEQ ID NOs: 1081-1440 and 3146-3180.

35. The antigen-binding unit of any one of the preceding claims, wherein the VL comprises a sequence selected from SEQ ID NOs: 1081-1440 and 3146-3180.

36. The antigen-binding unit of any one of the preceding claims, wherein the VL comprises a sequence comprising 10, 9, 8, 7, 6, 5, 4, 3, 2 or 1 amino acid additions, deletions, or substitutions compared with SEQ ID NOs: 1081-1440 and 3146-3180.

37. The antigen-binding unit of any one of the preceding claims, wherein the VL comprises a sequence having at least 80%, 85%, 90%, 91%, 92%, 93%, 94%, 95%, 96%, 97%, 98%, 99% or 99% identity to a sequence selected from SEQ ID NOs: 1081-1440 and 3146-3180.

38. The antigen-binding unit of any one of the preceding claims, wherein the antigen-binding unit binds to a receptor binding domain (RBD) of an S protein of a novel coronavirus (SARS-CoV-2) with an equilibrium dissociation constant (KD) of less than 100 nM, less than 50 nM, less than 20 nM, less than 15 nM, less than 10 nM, less than 5 nM, less than 4 nM, less than 3 nM, less than 2 nM, less than 1 nM, less than 0.5 nM, less than 0.1 nM, less than 0.05 nM, or less than 0.01 nM.

39. The antigen-binding unit of any one of the preceding claims, wherein the antigen-binding unit neutralizes the novel coronavirus (SARS-CoV-2) with an IC₅₀ of less than 20 μg/ml, less than 10 μg/ml, less than 9 μg/ml, less than 8 μg/ml, less than 7 μg/ml, less than 6 μg/ml, less than 5 μg/ml, less than 4 μg/ml, less than 3 μg/ml, less than 2 μg/ml, less than 1 μg/ml, less than 0.5 μg/ml, less than 0.25 μg/ml, less than 0.2 μg/ml, less than 0.1 μg/ml, less than 0.05 μg/ml, or less than 0.001 μg/ml.

40. An antigen-binding unit comprising a heavy chain variable region (VH) and a light chain variable region (VL), wherein the VH comprises a sequence having at least 80%, 85%, 90%, 91%, 92%, 93%, 94%, 95%, 96%, 97%, 98%, 99% or 99% identity to a sequence selected from SEQ ID NOs: 721-1080 and 3111-3145, and/or wherein the VL comprises a sequence having at least 80%, 85%, 90%, 91%, 92%, 93%, 94%, 95%, 96%, 97%, 98%, 99% or 99% identity to a sequence selected from SEQ ID NOs: 1081-1440 and 3146-3180.

41. The antigen-binding unit of any one of the preceding claims, wherein the antigen-binding unit binds to a receptor binding domain (RBD) of an S protein of a novel coronavirus (SARS-CoV-2) with an equilibrium dissociation constant (KD) of less than 100 nM, less than 50 nM, less than 20 nM, less than 15 nM, less than 10 nM, less than 5 nM, less than 4 nM, less than 3 nM, less than 2 nM, less than 1 nM, less than 0.5 nM, less than 0.1 nM, less than 0.05 nM, or less than 0.01 nM.

42. The antigen-binding unit of any one of the preceding claims, wherein the antigen-binding unit neutralizes the novel coronavirus (SARS-CoV-2) with an IC₅₀ of less than 20 μg/ml, less than 10 μg/ml, less than 9 μg/ml, less than 8 μg/ml, less than 7 μg/ml, less than 6 μg/ml, less than 5 μg/ml, less than 4 μg/ml, less than 3 μg/ml, less than 2 μg/ml, less than 1 μg/ml, less than 0.5 μg/ml, less than 0.25 μg/ml, less than 0.2 μg/ml, less than 0.1 μg/ml, less than 0.05 μg/ml, or less than 0.001 μg/ml.

43. A pharmaceutical composition comprising the antigen-binding unit of any one of claims 1 to 42 and a pharmaceutically acceptable excipient.

44. An isolated nucleic acid encoding the antigen-binding unit of any one of claims 1 to 42.

45. A vector comprising a nucleic acid sequence encoding the antigen-binding unit of any one of claims 1 to 42.

46. A host cell expressing the antigen-binding unit of any one of claims 1 to 42.

47. A host cell comprising a nucleic acid encoding the antigen-binding unit of any one of claims 1 to 42.

48. A method for producing the antigen-binding unit of any one of claims 1 to 42, comprising: culturing the host cell of claim 46 or 47 under conditions suitable for the expression of the antigen-binding unit; and isolating the antigen-binding unit expressed by the host cell.

49. A conjugate comprising the antigen-binding unit of any one of claims 1 to 42, wherein the antigen-binding unit is conjugated to a chemically functional moiety.

50. The conjugate of claim 49, wherein the chemically functional moiety is selected from a radioisotope, an enzyme, a fluorescent compound, a chemiluminescent compound, a bioluminescent compound, a substrate, a cofactor and an inhibitor.

51. A method for preventing and/or treating SARS-CoV-2 infection in a patient in need thereof, comprising administering the antigen-binding unit of any one of claims 1 to 42 or a nucleic acid encoding the antigen-binding unit to the patient.

52. A kit for detecting SARS-CoV-2, comprising the antigen-binding unit of any one of claims 1 to 42.

The application's sequence listing, which the Patent Office published only in electronic form, follows.

SEQUENCE LISTING (3180 sequences)

SEQ ID NO: 1 - protein, 17 aa, Artificial sequence
  VH CDR3
ARDVTLVRGTASPRFDY

SEQ ID NO: 2 - protein, 17 aa, Artificial sequence
  VH CDR3
ARDVTLVRGTASPRFDY

SEQ ID NO: 3 - protein, 16 aa, Artificial sequence
  VH CDR3
ARSTRRWLQFVFPFDY

SEQ ID NO: 4 - protein, 16 aa, Artificial sequence
  VH CDR3
ARSTRRWLQFVFPFDY

SEQ ID NO: 5 - protein, 16 aa, Artificial sequence
  VH CDR3
ARSTRRWLQFVFPFDY

SEQ ID NO: 6 - protein, 16 aa, Artificial sequence
  VH CDR3
ARSTRRWLQFVFPFDY

SEQ ID NO: 7 - protein, 16 aa, Artificial sequence
  VH CDR3
ARSTRRWLQFVFPFDY

SEQ ID NO: 8 - protein, 18 aa, Artificial sequence
  VH CDR3
ARQAPGGGLLGYYHGLDV

SEQ ID NO: 9 - protein, 18 aa, Artificial sequence
  VH CDR3
ARQAPGGGLLGYYHGLDV

SEQ ID NO: 10 - protein, 22 aa, Artificial sequence
  VH CDR3
ARDRYCGGDCSGPHYYYYGMDV

SEQ ID NO: 11 - protein, 20 aa, Artificial sequence
  VH CDR3
ARWDCSGGSCNYYYYYNMDV

SEQ ID NO: 12 - protein, 20 aa, Artificial sequence
  VH CDR3
ARWDCSGGSCNYYYYYNMDV

SEQ ID NO: 13 - protein, 21 aa, Artificial sequence
  VH CDR3
AREDILLVPAASNFYYFGMDV

SEQ ID NO: 14 - protein, 20 aa, Artificial sequence
  VH CDR3
ARGDYYDPDDRYNAYYSLGA

SEQ ID NO: 15 - protein, 10 aa, Artificial sequence
  VH CDR3
TKGSMLLEVY

SEQ ID NO: 16 - protein, 16 aa, Artificial sequence
  VH CDR3
ARAPSDSSGINGAFDI

SEQ ID NO: 17 - protein, 15 aa, Artificial sequence
  VH CDR3
ARPKAPGYSYLSLDY

SEQ ID NO: 18 - protein, 15 aa, Artificial sequence
  VH CDR3
CGFGVVTTDAYGMDV

SEQ ID NO: 19 - protein, 19 aa, Artificial sequence
  VH CDR3
VKDKACTTTSCYEGTFFDY

SEQ ID NO: 20 - protein, 14 aa, Artificial sequence
  VH CDR3
VRGDDSILTPTFDH

SEQ ID NO: 21 - protein, 15 aa, Artificial sequence
  VH CDR3
ARAGKGFMVITHFDY

SEQ ID NO: 22 - protein, 13 aa, Artificial sequence
  VH CDR3
ARPHTNSWDQFDY

SEQ ID NO: 23 - protein, 19 aa, Artificial sequence
  VH CDR3
ARPQGGSSWYRDYYYGMDV

SEQ ID NO: 24 - protein, 19 aa, Artificial sequence
  VH CDR3
ATSTAVLRYFAPTGGWFDP

SEQ ID NO: 25 - protein, 15 aa, Artificial sequence
  VH CDR3
AKDNGHSYGYSWFDP

SEQ ID NO: 26 - protein, 16 aa, Artificial sequence
  VH CDR3
ATDGATIPINYYGMDV

SEQ ID NO: 27 - protein, 16 aa, Artificial sequence
  VH CDR3
ARSPITMIVVVNAFDI

SEQ ID NO: 28 - protein, 16 aa, Artificial sequence
  VH CDR3
ARARITMIVVVNHFDY

SEQ ID NO: 29 - protein, 15 aa, Artificial sequence
  VH CDR3
ARVQSTGYKYWYFDI

SEQ ID NO: 30 - protein, 6 aa, Artificial sequence
  VH CDR3
ARGFDY

SEQ ID NO: 31 - protein, 14 aa, Artificial sequence
  VH CDR3
ARARDYGSGSPMDV

SEQ ID NO: 32 - protein, 19 aa, Artificial sequence
  VH CDR3
ARDGVYYGSVIYHHYDLHV

SEQ ID NO: 33 - protein, 14 aa, Artificial sequence
  VH CDR3
ARGGGELLRYPFDY

SEQ ID NO: 34 - protein, 17 aa, Artificial sequence
  VH CDR3
AKAGLGLETSGGNYFES

SEQ ID NO: 35 - protein, 12 aa, Artificial sequence
  VH CDR3
AKDRVTMNYFDY

SEQ ID NO: 36 - protein, 15 aa, Artificial sequence
  VH CDR3
ARVREGYTSGWYADY

SEQ ID NO: 37 - protein, 18 aa, Artificial sequence
  VH CDR3
ARDRSYYHSSGYHYYFDY

SEQ ID NO: 38 - protein, 15 aa, Artificial sequence
  VH CDR3
VRDRIVGGYSYGGDY

SEQ ID NO: 39 - protein, 9 aa, Artificial sequence
  VH CDR3
AKGRLSPRL

SEQ ID NO: 40 - protein, 12 aa, Artificial sequence
  VH CDR3
ARVKVDNVVFDL

SEQ ID NO: 41 - protein, 16 aa, Artificial sequence
  VH CDR3
ARDRGLAARPAGWVDL

SEQ ID NO: 42 - protein, 14 aa, Artificial sequence
  VH CDR3
ARENFHFSGTPPLY

SEQ ID NO: 43 - protein, 22 aa, Artificial sequence
  VH CDR3
ARKYTYDTSGFFLSSSRNAFDV

SEQ ID NO: 44 - protein, 10 aa, Artificial sequence
  VH CDR3
ARLGSNGYGL

SEQ ID NO: 45 - protein, 22 aa, Artificial sequence
  VH CDR3
ARTYSYDSSGFFLTSSREAFDI

SEQ ID NO: 46 - protein, 22 aa, Artificial sequence
  VH CDR3
VRKYSFDVSGFFLSSSRHAFDV

SEQ ID NO: 47 - protein, 22 aa, Artificial sequence
  VH CDR3
ARKYSYDTSGFFLTSSRDAFDV

SEQ ID NO: 48 - protein, 22 aa, Artificial sequence
  VH CDR3
VRKFSYDISGFFLTSSRDAFDV

SEQ ID NO: 49 - protein, 5 aa, Artificial sequence
  VH CDR3
ATEGV

SEQ ID NO: 50 - protein, 12 aa, Artificial sequence
  VH CDR3
LLIEGMGATSGD

SEQ ID NO: 51 - protein, 13 aa, Artificial sequence
  VH CDR3
ATTNDGYYYGMDV

SEQ ID NO: 52 - protein, 18 aa, Artificial sequence
  VH CDR3
ATNPHNTAMVLDYYGMDV

SEQ ID NO: 53 - protein, 21 aa, Artificial sequence
  VH CDR3
AGAYIAAAGWGWELFQYYFDY

SEQ ID NO: 54 - protein, 13 aa, Artificial sequence
  VH CDR3
AHQAPFEWFGVDY

SEQ ID NO: 55 - protein, 25 aa, Artificial sequence
  VH CDR3
TTDGLYCSGGSCYYHSYYYYYGMDV

SEQ ID NO: 56 - protein, 21 aa, Artificial sequence
  VH CDR3
ARDGLGNYDILTGYTERAFDI

SEQ ID NO: 57 - protein, 19 aa, Artificial sequence
  VH CDR3
ARVKPILRVVVVAATPCDY

SEQ ID NO: 58 - protein, 25 aa, Artificial sequence
  VH CDR3
ARHARGYQLLSPRLGELSLYRSFDY

SEQ ID NO: 59 - protein, 18 aa, Artificial sequence
  VH CDR3
ARATTTKMIVVVINAFDI

SEQ ID NO: 60 - protein, 19 aa, Artificial sequence
  VH CDR3
ARHWITMIVVVIKGGWFDP

SEQ ID NO: 61 - protein, 18 aa, Artificial sequence
  VH CDR3
ARIRGQWLVGKYYYGMDV

SEQ ID NO: 62 - protein, 14 aa, Artificial sequence
  VH CDR3
AHRGWGFSSSFFDY

SEQ ID NO: 63 - protein, 15 aa, Artificial sequence
  VH CDR3
ARMSSSLQHYYGMDV

SEQ ID NO: 64 - protein, 15 aa, Artificial sequence
  VH CDR3
ARMSSSLQHYYGMDV

SEQ ID NO: 65 - protein, 17 aa, Artificial sequence
  VH CDR3
ARDVTLVRGTASPRFDY

SEQ ID NO: 66 - protein, 17 aa, Artificial sequence
  VH CDR3
ARDVTLVRGTASPRFDY

SEQ ID NO: 67 - protein, 14 aa, Artificial sequence
  VH CDR3
AQEGRNYDRNWFDP

SEQ ID NO: 68 - protein, 11 aa, Artificial sequence
  VH CDR3
ARLIPIDGRDV

SEQ ID NO: 69 - protein, 12 aa, Artificial sequence
  VH CDR3
TTYWDQYTSTWT

SEQ ID NO: 70 - protein, 15 aa, Artificial sequence
  VH CDR3
ASIVKYDSSGYNFDY

SEQ ID NO: 71 - protein, 14 aa, Artificial sequence
  VH CDR3
TRDPWHESEHRFDP

SEQ ID NO: 72 - protein, 14 aa, Artificial sequence
  VH CDR3
AKDNKVSSWYSFDI

SEQ ID NO: 73 - protein, 10 aa, Artificial sequence
  VH CDR3
ARGLGYYVAL

SEQ ID NO: 74 - protein, 18 aa, Artificial sequence
  VHCDR3
VRGGQEVSLRRLDWFVGY

SEQ ID NO: 75 - protein, 13 aa, Artificial sequence
  VH CDR3
AKERGGSGKMYDY

SEQ ID NO: 76 - protein, 18 aa, Artificial sequence
  VH CDR3
ARRGAAVAGTTGGSAFDI

SEQ ID NO: 77 - protein, 17 aa, Artificial sequence
  VH CDR3
TKTSDLLYYGSGSYLPY

SEQ ID NO: 78 - protein, 8 aa, Artificial sequence
  VH CDR3
TRDGGAWD

SEQ ID NO: 79 - protein, 18 aa, Artificial sequence
  VH CDR3
ARGIPREYTTRWENAFDI

SEQ ID NO: 80 - protein, 18 aa, Artificial sequence
  VH CDR3
ARDRGADKDSNSGDVFDI

SEQ ID NO: 81 - protein, 7 aa, Artificial sequence
  VH CDR3
VGPQGAY

SEQ ID NO: 82 - protein, 15 aa, Artificial sequence
  VH CDR3
ARDPRGSSTSCSYDY

SEQ ID NO: 83 - protein, 18 aa, Artificial sequence
  VH CDR3
TGQERITIFGVVIISSDY

SEQ ID NO: 84 - protein, 11 aa, Artificial sequence
  VH CDR3
ARRLNDGANHS

SEQ ID NO: 85 - protein, 12 aa, Artificial sequence
  VH CDR3
SWDATVYYDMAV

SEQ ID NO: 86 - protein, 14 aa, Artificial sequence
  VH CDR3
ARPSSGSYADPFDI

SEQ ID NO: 87 - protein, 10 aa, Artificial sequence
  VH CDR3
VASRSSSLDY

SEQ ID NO: 88 - protein, 14 aa, Artificial sequence
  VH CDR3
ARSRGYGGLAGVDY

SEQ ID NO: 89 - protein, 14 aa, Artificial sequence
  VH CDR3
ARAYFDDSSGGFDY

SEQ ID NO: 90 - protein, 14 aa, Artificial sequence
  VH CDR3
AGSTYGDYVPHFYF

SEQ ID NO: 91 - protein, 23 aa, Artificial sequence
  VH CDR3
ARGLSSFTTIVVVFVGASFYFDS

SEQ ID NO: 92 - protein, 23 aa, Artificial sequence
  VH CDR3
ARGTTSTTMIVIVITAVSTWFDP

SEQ ID NO: 93 - protein, 23 aa, Artificial sequence
  VH CDR3
ARHPLKVDTIFGVVIIDPAPFDY

SEQ ID NO: 94 - protein, 25 aa, Artificial sequence
  VH CDR3
ARIASYYYDSSGYYQTRPIGHAFDI

SEQ ID NO: 95 - protein, 18 aa, Artificial sequence
  VH CDR3
AKDRAQLLWFGQSRGMDV

SEQ ID NO: 96 - protein, 6 aa, Artificial sequence
  VH CDR3
TSTSDW

SEQ ID NO: 97 - protein, 20 aa, Artificial sequence
  VH CDR3
TRLRSGLVGFDWLPLYGMDV

SEQ ID NO: 98 - protein, 18 aa, Artificial sequence
  VH CDR3
ARRGVGILKDLPVYAMDV

SEQ ID NO: 99 - protein, 21 aa, Artificial sequence
  VH CDR3
AREARQIFITMMTTKTSWFDP

SEQ ID NO: 100 - protein, 20 aa, Artificial sequence
  VH CDR3
ARVSSTAVVTGLDYYYGMDV

SEQ ID NO: 101 - protein, 22 aa, Artificial sequence
  VH CDR3
TTISVGLLWFGLAVRDHYYFDY

SEQ ID NO: 102 - protein, 18 aa, Artificial sequence
  VH CDR3
ARSYYDSSTGYYPDALDL

SEQ ID NO: 103 - protein, 18 aa, Artificial sequence
  VH CDR3
AKSGSVWGSYHKTYYFDY

SEQ ID NO: 104 - protein, 21 aa, Artificial sequence
  VH CDR3
AKEILKGYSSGWKYYYYGMDV

SEQ ID NO: 105 - protein, 22 aa, Artificial sequence
  VH CDR3
ARATTTMVRGVIYHYYYYGMDV

SEQ ID NO: 106 - protein, 17 aa, Artificial sequence
  VH CDR3
ARERLGRMVRGVNWFDP

SEQ ID NO: 107 - protein, 15 aa, Artificial sequence
  VH CDR3
ASWTMVRGVIRWFDP

SEQ ID NO: 108 - protein, 23 aa, Artificial sequence
  VH CDR3
ARQFHYVGIVVVVAPHYYYGMDV

SEQ ID NO: 109 - protein, 13 aa, Artificial sequence
  VH CDR3
ASPRGYSYGPFDY

SEQ ID NO: 110 - protein, 21 aa, Artificial sequence
  VH CDR3
ARVLYYDILTGYWWYYYGMDV

SEQ ID NO: 111 - protein, 19 aa, Artificial sequence
  VH CDR3
ARGAPITIFGVVISTWFDP

SEQ ID NO: 112 - protein, 12 aa, Artificial sequence
  VH CDR3
ARAHTDSLELGI

SEQ ID NO: 113 - protein, 22 aa, Artificial sequence
  VH CDR3
VRKYTYDTSGFFLTSTRSAFDV

SEQ ID NO: 114 - protein, 22 aa, Artificial sequence
  VH CDR3
ARKHVYDTSGFFLSSSRNAFDV

SEQ ID NO: 115 - protein, 22 aa, Artificial sequence
  VH CDR3
ARKYSFDISGFFLSSSRYALDV

SEQ ID NO: 116 - protein, 22 aa, Artificial sequence
  VH CDR3
ARDEGVTFHDHWANEIRYGMDV

SEQ ID NO: 117 - protein, 16 aa, Artificial sequence
  VH CDR3
ARARTTMIVVVSQFDY

SEQ ID NO: 118 - protein, 19 aa, Artificial sequence
  VH CDR3
ARDRGGWLLGSYYYYGMDV

SEQ ID NO: 119 - protein, 14 aa, Artificial sequence
  VH CDR3
ARGQISHYGFGESH

SEQ ID NO: 120 - protein, 20 aa, Artificial sequence
  VH CDR3
AHSGIAVVGNQLFHYYAMDV

SEQ ID NO: 121 - protein, 21 aa, Artificial sequence
  VH CDR3
AKERSSGSQWGWTYYYYGMDV

SEQ ID NO: 122 - protein, 23 aa, Artificial sequence
  VH CDR3
ARDPYGGNRRFHGWVYYYYGMDV

SEQ ID NO: 123 - protein, 14 aa, Artificial sequence
  VH CDR3
ARESTPDVRGVMNY

SEQ ID NO: 124 - protein, 13 aa, Artificial sequence
  VH CDR3
AKDAVASAGSPDY

SEQ ID NO: 125 - protein, 23 aa, Artificial sequence
  VH CDR3
ARDKLLWFGEPVVGYYYYYYMDV

SEQ ID NO: 126 - protein, 15 aa, Artificial sequence
  VH CDR3
ARDGGGDYAQIYFDY

SEQ ID NO: 127 - protein, 17 aa, Artificial sequence
  VH CDR3
ARDRLMTTYNYYSSMDV

SEQ ID NO: 128 - protein, 19 aa, Artificial sequence
  VH CDR3
AREPGDCSGGSCYYYGMDV

SEQ ID NO: 129 - protein, 15 aa, Artificial sequence
  VH CDR3
ARATRGYSYDDAFDI

SEQ ID NO: 130 - protein, 18 aa, Artificial sequence
  VH CDR3
ASPSYTDLLTGYYVPVDY

SEQ ID NO: 131 - protein, 22 aa, Artificial sequence
  VH CDR3
AKDPRVNELLWFGSLTQFYFDD

SEQ ID NO: 132 - protein, 17 aa, Artificial sequence
  VH CDR3
AKSGGPFHLSLYYYMDV

SEQ ID NO: 133 - protein, 11 aa, Artificial sequence
  VH CDR3
ARAFYGHAFDF

SEQ ID NO: 134 - protein, 10 aa, Artificial sequence
  VH CDR3
AKGLTIPFDK

SEQ ID NO: 135 - protein, 10 aa, Artificial sequence
  VH CDR3
AKGLTIPFDK

SEQ ID NO: 136 - protein, 19 aa, Artificial sequence
  VH CDR3
ARRGKYCSGGRCYSWWFDP

SEQ ID NO: 137 - protein, 11 aa, Artificial sequence
  VH CDR3
ARVASLIGDDY

SEQ ID NO: 138 - protein, 11 aa, Artificial sequence
  VH CDR3
ARVASLIGDDY

SEQ ID NO: 139 - protein, 13 aa, Artificial sequence
  VH CDR3
AHKPSGWSLRFDS

SEQ ID NO: 140 - protein, 11 aa, Artificial sequence
  VHCDR4
ARESLFNWFDS

SEQ ID NO: 141 - protein, 10 aa, Artificial sequence
  VH CDR3
AKGLTIPFDN

SEQ ID NO: 142 - protein, 11 aa, Artificial sequence
  VH CDR3
ARVDYDSSRNY

SEQ ID NO: 143 - protein, 18 aa, Artificial sequence
  VH DR3
ARVERWLVLGYYYYGMDV

SEQ ID NO: 144 - protein, 5 aa, Artificial sequence
  VH CDR3
GSIDY

SEQ ID NO: 145 - protein, 16 aa, Artificial sequence
  VH CDR3
AKMYSDYDDNYYGLDV

SEQ ID NO: 146 - protein, 20 aa, Artificial sequence
  VH CDR3
ARDRYCSSTSCGGYYYYMDV

SEQ ID NO: 147 - protein, 17 aa, Artificial sequence
  VH CDR3
ARAPNDFWSGYPYYFDY

SEQ ID NO: 148 - protein, 15 aa, Artificial sequence
  VH CDR3
TRDGSTAAIFGNIDY

SEQ ID NO: 149 - protein, 16 aa, Artificial sequence
  VH CDR3
ARGVVRNDYGDPGFDY

SEQ ID NO: 150 - protein, 20 aa, Artificial sequence
  VH CDR3
ATAPAYCSGGSCPENNWFDP

SEQ ID NO: 151 - protein, 20 aa, Artificial sequence
  VH CDR3
AILWFGEFYFYDLFYNAVDV

SEQ ID NO: 152 - protein, 20 aa, Artificial sequence
  VH CDR3
AILWFGEFYFYDLFYNAVDV

SEQ ID NO: 153 - protein, 20 aa, Artificial sequence
  VH CDR3
ASRREQWLGDLGYYYYGMDV

SEQ ID NO: 154 - protein, 10 aa, Artificial sequence
  VH CDR3
ARGGAHSEDY

SEQ ID NO: 155 - protein, 20 aa, Artificial sequence
  VH CDR3
ARHQDPLDIVATVDWGGLDY

SEQ ID NO: 156 - protein, 11 aa, Artificial sequence
  VH CDR3
ARVASLIGDDY

SEQ ID NO: 157 - protein, 14 aa, Artificial sequence
  VH CDR3
ATTGTDNYYYYMDV

SEQ ID NO: 158 - protein, 15 aa, Artificial sequence
  VH CDR3
ARKNCSGGICYFHDY

SEQ ID NO: 159 - protein, 13 aa, Artificial sequence
  VH CDR3
AHKPSGWSLRFDS

SEQ ID NO: 160 - protein, 14 aa, Artificial sequence
  VH CDR3
AKGQTIQLWLFGAL

SEQ ID NO: 161 - protein, 14 aa, Artificial sequence
  VH CDR3
ALTVSSWYPGIFEN

SEQ ID NO: 162 - protein, 14 aa, Artificial sequence
  VH CDR3
AKAFSGSYWDAFDI

SEQ ID NO: 163 - protein, 15 aa, Artificial sequence
  VH CDR3
AKAASGARGYYGMDV

SEQ ID NO: 164 - protein, 14 aa, Artificial sequence
  VH CDR3
ARSSSGHYVSDLGY

SEQ ID NO: 165 - protein, 12 aa, Artificial sequence
  VH CDR3
ARALNGYRYNDY

SEQ ID NO: 166 - protein, 14 aa, Artificial sequence
  VH CDR3
AREEGGGSSTHFDC

SEQ ID NO: 167 - protein, 14 aa, Artificial sequence
  VH CDR3
ARTREGSYYYGMDV

SEQ ID NO: 168 - protein, 18 aa, Artificial sequence
  VH CDR3
VRGGLQFVVAVGPYGVDV

SEQ ID NO: 169 - protein, 18 aa, Artificial sequence
  VH CDR3
VRGGLQFVVAVGPYGVDV

SEQ ID NO: 170 - protein, 11 aa, Artificial sequence
  VH CDR3
ARDIGGGAPDY

SEQ ID NO: 171 - protein, 12 aa, Artificial sequence
  VH CDR3
AIKPSIPGYFDP

SEQ ID NO: 172 - protein, 13 aa, Artificial sequence
  VH CDR3
ARVGGWQRSPRPN

SEQ ID NO: 173 - protein, 13 aa, Artificial sequence
  VH CDR3
ARVGGWQRSPRPN

SEQ ID NO: 174 - protein, 15 aa, Artificial sequence
  VH CDR3
ARGQGYGRVLLWFGE

SEQ ID NO: 175 - protein, 15 aa, Artificial sequence
  VH CDR3
ARGQGYGRVLLWFGE

SEQ ID NO: 176 - protein, 11 aa, Artificial sequence
  VH CDR3
ARPSSGSRFDY

SEQ ID NO: 177 - protein, 6 aa, Artificial sequence
  VH CDR3
ARGFDY

SEQ ID NO: 178 - protein, 11 aa, Artificial sequence
  VH CDR3
AKARGVVLFDY

SEQ ID NO: 179 - protein, 16 aa, Artificial sequence
  VH CDR3
ARHSYGSGTYLDPFDY

SEQ ID NO: 180 - protein, 21 aa, Artificial sequence
  VH CDR3
ARQPHLAYYYDSSGYNDAFDI

SEQ ID NO: 181 - protein, 13 aa, Artificial sequence
  VH CDR3
ARGAVVTPFGLDS

SEQ ID NO: 182 - protein, 14 aa, Artificial sequence
  VH CDR3
ASEDYYDSSGYYWY

SEQ ID NO: 183 - protein, 18 aa, Artificial sequence
  VH CDR3
ARLSAIAVVGYYYYAMDV

SEQ ID NO: 184 - protein, 18 aa, Artificial sequence
  VH CDR3
ARDFIAASPFYYYYYMDV

SEQ ID NO: 185 - protein, 19 aa, Artificial sequence
  VH CDR3
ATSPGGYGVRRTVLEDFRH

SEQ ID NO: 186 - protein, 14 aa, Artificial sequence
  VH CDR3
WTMEYDDYSFVYDY

SEQ ID NO: 187 - protein, 16 aa, Artificial sequence
  VH CDR3
ARGGKQQLVRNYYLDS

SEQ ID NO: 188 - protein, 14 aa, Artificial sequence
  VH CDR3
ATGFGGVIVRGFDY

SEQ ID NO: 189 - protein, 13 aa, Artificial sequence
  VH CDR3
ARVYGDYSYYMDV

SEQ ID NO: 190 - protein, 12 aa, Artificial sequence
  VHCRD3
ARDLGEAGGMDV

SEQ ID NO: 191 - protein, 16 aa, Artificial sequence
  VH CDR3
VREIESGVDFWSGHYY

SEQ ID NO: 192 - protein, 17 aa, Artificial sequence
  VH CDR3
ARDSAYYDTIGYYSGDY

SEQ ID NO: 193 - protein, 12 aa, Artificial sequence
  VH CDR3
GRSFRGSCFDYL

SEQ ID NO: 194 - protein, 12 aa, Artificial sequence
  VH CDR3
ALGTGSYYGVNY

SEQ ID NO: 195 - protein, 21 aa, Artificial sequence
  VH CDR3
AKDMGGRYSSGLYYYYYGMDV

SEQ ID NO: 196 - protein, 10 aa, Artificial sequence
  VH CDR3
ARELRGYFDY

SEQ ID NO: 197 - protein, 18 aa, Artificial sequence
  VH CDR3
ARDPNDFWSGFPRGAFDI

SEQ ID NO: 198 - protein, 13 aa, Artificial sequence
  VH CDR3
ASHARYEEETFDY

SEQ ID NO: 199 - protein, 17 aa, Artificial sequence
  VH CDR3
VRDSYTSAWTPAGYFDL

SEQ ID NO: 200 - protein, 10 aa, Artificial sequence
  VH CDR3
AKDHYGSIDY

SEQ ID NO: 201 - protein, 12 aa, Artificial sequence
  VH CDR3
ARPYTSRWFWSN

SEQ ID NO: 202 - protein, 17 aa, Artificial sequence
  VH CDR3
ALLPPNAYDYGDGLLDH

SEQ ID NO: 203 - protein, 16 aa, Artificial sequence
  VH CDR3
ARHRAAGGNYYYGMDV

SEQ ID NO: 204 - protein, 14 aa, Artificial sequence
  VH CDR3
ARERVGPAAGYMDV

SEQ ID NO: 205 - protein, 17 aa, Artificial sequence
  VH CDR3
ARAAYYYDSSGYGWFDP

SEQ ID NO: 206 - protein, 15 aa, Artificial sequence
  VH CDR3
ARGDYTEYSYYYMDV

SEQ ID NO: 207 - protein, 15 aa, Artificial sequence
  VH CDR3
ALPTGASSSYSGPNY

SEQ ID NO: 208 - protein, 16 aa, Artificial sequence
  VH CDR3
ARDEVIAVATGEGMDV

SEQ ID NO: 209 - protein, 17 aa, Artificial sequence
  VH CDR3
AKDMGYDILTGSGLGDY

SEQ ID NO: 210 - protein, 14 aa, Artificial sequence
  VH CDR3
AKEPLFGETYGMDV

SEQ ID NO: 211 - protein, 20 aa, Artificial sequence
  VH CDR3
ARDKGSGSYYSGAYYYYMDV

SEQ ID NO: 212 - protein, 13 aa, Artificial sequence
  VH CDR3
ATFNSGNDNAYEY

SEQ ID NO: 213 - protein, 18 aa, Artificial sequence
  VH CDR3
AREYPDFWSGHYYYYMDV

SEQ ID NO: 214 - protein, 9 aa, Artificial sequence
  VH CDR3
ARLPYGMDV

SEQ ID NO: 215 - protein, 17 aa, Artificial sequence
  VH CDR3
ARGLYDKSGYRSDGFDS

SEQ ID NO: 216 - protein, 19 aa, Artificial sequence
  VH CDR3
ARGFEGYCSGGRCYSYFDY

SEQ ID NO: 217 - protein, 11 aa, Artificial sequence
  VH CDR3
ARVKNWDYGLY

SEQ ID NO: 218 - protein, 12 aa, Artificial sequence
  VH CDR3
ARDGQSDWHFDL

SEQ ID NO: 219 - protein, 10 aa, Artificial sequence
  VH CDR3
ARVYGDYLDH

SEQ ID NO: 220 - protein, 20 aa, Artificial sequence
  VH CDR3
AHRSFLYNIFNGYSYAPFDY

SEQ ID NO: 221 - protein, 11 aa, Artificial sequence
  VH CDR3
AKDLFSGDRDF

SEQ ID NO: 222 - protein, 15 aa, Artificial sequence
  VH CDR3
AKDSGAVLLWFGADF

SEQ ID NO: 223 - protein, 19 aa, Artificial sequence
  VH CDR3
AREGAYDIWRGSYMRAYDH

SEQ ID NO: 224 - protein, 9 aa, Artificial sequence
  VH CDR3
ARYIEMFDP

SEQ ID NO: 225 - protein, 18 aa, Artificial sequence
  VH CDR3
ARQAYGDYGWDYYYGMDV

SEQ ID NO: 226 - protein, 20 aa, Artificial sequence
  VH CDR3
LKDWDWEYEDSRPTLRGSVY

SEQ ID NO: 227 - protein, 17 aa, Artificial sequence
  VH CDR3
ARGSVFWFGEGKNWFDP

SEQ ID NO: 228 - protein, 17 aa, Artificial sequence
  VH CDR3
ARGSVFWFGEGKNWFDP

SEQ ID NO: 229 - protein, 13 aa, Artificial sequence
  VH CDR3
AREDSSGWSRGDY

SEQ ID NO: 230 - protein, 16 aa, Artificial sequence
  VH CDR3
ARRFVVREVEYNWFDP

SEQ ID NO: 231 - protein, 20 aa, Artificial sequence
  VH CDR3
ARDGYCNSMRCYRYYHGMDV

SEQ ID NO: 232 - protein, 18 aa, Artificial sequence
  VH CDR3
ATGPTAKPNKQWGYWFDP

SEQ ID NO: 233 - protein, 12 aa, Artificial sequence
  VH CDR3
ASPVSVEQDFDI

SEQ ID NO: 234 - protein, 7 aa, Artificial sequence
  VH CDR3
TTPVGDF

SEQ ID NO: 235 - protein, 10 aa, Artificial sequence
  VH CDR3
STSHPPFFDY

SEQ ID NO: 236 - protein, 14 aa, Artificial sequence
  VH CDR3
ARGLWQLVSPVFDY

SEQ ID NO: 237 - protein, 15 aa, Artificial sequence
  VH CDR3
AKVTNRGVRGLYFDY

SEQ ID NO: 238 - protein, 12 aa, Artificial sequence
  VH CDR3
ASPVSVEQDFDI

SEQ ID NO: 239 - protein, 9 aa, Artificial sequence
  VH CDR3
AINTLLVTA

SEQ ID NO: 240 - protein, 20 aa, Artificial sequence
  VH CDR3
VHRSFLYDIFSGYSYAPFDY

SEQ ID NO: 241 - protein, 20 aa, Artificial sequence
  VH CDR3
AHRSFLYNIFDGYSYAPFDY

SEQ ID NO: 242 - protein, 24 aa, Artificial sequence
  VH CDR3
AGGADCRRTSCHYLVSNREEYMGV

SEQ ID NO: 243 - protein, 19 aa, Artificial sequence
  VH CDR3
ARGLVLSGTRYSYFYGMDV

SEQ ID NO: 244 - protein, 20 aa, Artificial sequence
  VH CDR3
VKDWDWEYEDNRPTLRGSVY

SEQ ID NO: 245 - protein, 20 aa, Artificial sequence
  VH CDR3
VKDWDWEYEESRPTLRGSVY

SEQ ID NO: 246 - protein, 18 aa, Artificial sequence
  VH CDR3
AKGGPIFWLGEGKNWFDA

SEQ ID NO: 247 - protein, 15 aa, Artificial sequence
  VH CDR3
ARDKGGILMLRGADF

SEQ ID NO: 248 - protein, 14 aa, Artificial sequence
  VH CDR3
ARTLIAAAGSAFDI

SEQ ID NO: 249 - protein, 19 aa, Artificial sequence
  VH CDR3
ARGPTSITMIVVVDDAFDI

SEQ ID NO: 250 - protein, 19 aa, Artificial sequence
  VH CDR3
ARVMNSSWYTRYYYNYMDV

SEQ ID NO: 251 - protein, 17 aa, Artificial sequence
  VH CDR3
ARRGGGCSEGVCYNFDR

SEQ ID NO: 252 - protein, 8 aa, Artificial sequence
  VH CDR3
ARGDPRDY

SEQ ID NO: 253 - protein, 16 aa, Artificial sequence
  VH CDR3
ARGSYYYDSSGYYLDY

SEQ ID NO: 254 - protein, 17 aa, Artificial sequence
  VH CDR3
ARAAYYYDSSGYGWFDP

SEQ ID NO: 255 - protein, 17 aa, Artificial sequence
  VH CDR3
TTDLGATGIYYYYYMDV

SEQ ID NO: 256 - protein, 22 aa, Artificial sequence
  VH CDR3
ARFPRDYYDSSGYLIQEGNFDY

SEQ ID NO: 257 - protein, 17 aa, Artificial sequence
  VH CDR3
ARVTRAGAAGDGGAFDI

SEQ ID NO: 258 - protein, 12 aa, Artificial sequence
  VH CDR3
ARSVVPVAGTDY

SEQ ID NO: 259 - protein, 20 aa, Artificial sequence
  VH CDR3
ARDQHPGYPALVYYYYYMDV

SEQ ID NO: 260 - protein, 10 aa, Artificial sequence
  VH CDR3
ARDNIQTFDY

SEQ ID NO: 261 - protein, 15 aa, Artificial sequence
  VH CDR3
ATSSPVAGYNSWFDP

SEQ ID NO: 262 - protein, 14 aa, Artificial sequence
  VH CDR3
ATGPAVIPLRWFDP

SEQ ID NO: 263 - protein, 15 aa, Artificial sequence
  VH CDR3
ATAPAAAGPTDWFDP

SEQ ID NO: 264 - protein, 14 aa, Artificial sequence
  VH CDR3
AISPSVHSLWWFDP

SEQ ID NO: 265 - protein, 21 aa, Artificial sequence
  VH CDR3
ARDEIHYDILTGYYNRFWFHP

SEQ ID NO: 266 - protein, 21 aa, Artificial sequence
  VH CDR3
ARDAETGYYDSSGYPINWFDP

SEQ ID NO: 267 - protein, 16 aa, Artificial sequence
  VH CDR3
ARHYYDTGAYYVPFDH

SEQ ID NO: 268 - protein, 14 aa, Artificial sequence
  VH CDR3
AHFQGFGESEYFQH

SEQ ID NO: 269 - protein, 11 aa, Artificial sequence
  VH CDR3
AHRHPLTGFDS

SEQ ID NO: 270 - protein, 13 aa, Artificial sequence
  VH CDR3
ATPRGYSYGPLDY

SEQ ID NO: 271 - protein, 13 aa, Artificial sequence
  VH CDR3
ASPRGYSYGPFDY

SEQ ID NO: 272 - protein, 19 aa, Artificial sequence
  VH CDR3
ARDRVDKGYDFWSSWYFDL

SEQ ID NO: 273 - protein, 13 aa, Artificial sequence
  VH CDR3
ASGGGSYFDAFDI

SEQ ID NO: 274 - protein, 14 aa, Artificial sequence
  VH CDR3
ARDRSGSYYGGFDY

SEQ ID NO: 275 - protein, 14 aa, Artificial sequence
  VH CDR3
AKAVYGGNSVYFDY

SEQ ID NO: 276 - protein, 14 aa, Artificial sequence
  VH CDR3
ARIYGGNYENYFDY

SEQ ID NO: 277 - protein, 14 aa, Artificial sequence
  VH CDR3
ARESEAGTTPSFDY

SEQ ID NO: 278 - protein, 14 aa, Artificial sequence
  VH CDR3
ARSLVRGVITYFDY

SEQ ID NO: 279 - protein, 8 aa, Artificial sequence
  VH CDR3
ARGLSMEV

SEQ ID NO: 280 - protein, 18 aa, Artificial sequence
  VH CDR3
ARGGYSSSWYGTKYYFDY

SEQ ID NO: 281 - protein, 18 aa, Artificial sequence
  VH CDR3
ARGPTVTTFFRRNAWFDP

SEQ ID NO: 282 - protein, 18 aa, Artificial sequence
  VH CDR3
ARGRYSSGWYGSRNWFDP

SEQ ID NO: 283 - protein, 15 aa, Artificial sequence
  VH CDR3
ARLSMGAARQSGFDP

SEQ ID NO: 284 - protein, 24 aa, Artificial sequence
  VH CDR3
ARDGGRDGYNELGARVYYYYGMDV

SEQ ID NO: 285 - protein, 8 aa, Artificial sequence
  VH CDR3
ARIGSYGI

SEQ ID NO: 286 - protein, 18 aa, Artificial sequence
  VH CDR3
AKLGCSGGSCYYYYGMDV

SEQ ID NO: 287 - protein, 17 aa, Artificial sequence
  VH CDR3
ARGDHYYDRSGPHKFDY

SEQ ID NO: 288 - protein, 20 aa, Artificial sequence
  VH CDR3
ARDSPLKFDSFGYPLYGMDV

SEQ ID NO: 289 - protein, 14 aa, Artificial sequence
  VH CDR3
ARGIVGATPGYFDY

SEQ ID NO: 290 - protein, 13 aa, Artificial sequence
  VH CDR3
AKAVSGWPIYFDA

SEQ ID NO: 291 - protein, 13 aa, Artificial sequence
  VH CDR3
AKAVSGWPIYFDA

SEQ ID NO: 292 - protein, 14 aa, Artificial sequence
  VH CDR3
AHTIHSGYDRTFDS

SEQ ID NO: 293 - protein, 14 aa, Artificial sequence
  VH CDR3
AREESYSSSSPLDY

SEQ ID NO: 294 - protein, 18 aa, Artificial sequence
  VH CDR3
AAGSDFWSGYYVNYYMDV

SEQ ID NO: 295 - protein, 12 aa, Artificial sequence
  VH CDR3
ARLTAAGVYFDY

SEQ ID NO: 296 - protein, 18 aa, Artificial sequence
  VH CDR3
AKTRGRGLYDYVWGSKDY

SEQ ID NO: 297 - protein, 18 aa, Artificial sequence
  VH CDR3
AKTRGRGLYDYVWGSKDY

SEQ ID NO: 298 - protein, 16 aa, Artificial sequence
  VH CDR3
ARDESGSYYGDQAFDI

SEQ ID NO: 299 - protein, 24 aa, Artificial sequence
  VH CDR3
ARDRRARAYEIPFGSDHYYFGMDV

SEQ ID NO: 300 - protein, 17 aa, Artificial sequence
  VH CDR3
ARDYYGSGSYPIGYMDV

SEQ ID NO: 301 - protein, 17 aa, Artificial sequence
  VH CDR3
TTSYCSTKVCFDYWFDP

SEQ ID NO: 302 - protein, 15 aa, Artificial sequence
  VH CDR3
ASNLYATSPYGGVKN

SEQ ID NO: 303 - protein, 14 aa, Artificial sequence
  VH CDR3
AKDIGSGSPDAFDI

SEQ ID NO: 304 - protein, 15 aa, Artificial sequence
  VH CDR3
VKDLEFRGGTGGFDL

SEQ ID NO: 305 - protein, 13 aa, Artificial sequence
  VH CDR3
ARDGHSAWGAFDI

SEQ ID NO: 306 - protein, 13 aa, Artificial sequence
  VH CDR3
ARDHPTLRRAFDY

SEQ ID NO: 307 - protein, 15 aa, Artificial sequence
  VH CDR3
ARDRGSSSWWGWLDP

SEQ ID NO: 308 - protein, 17 aa, Artificial sequence
  VH CDR3
ATRRGYSGYGAAYYFDY

SEQ ID NO: 309 - protein, 20 aa, Artificial sequence
  VH CDR3
AREVYVGGEDDYSYYYGLDV

SEQ ID NO: 310 - protein, 20 aa, Artificial sequence
  VH CDR3
TTDLGEAGPTEWLRSSLFDY

SEQ ID NO: 311 - protein, 17 aa, Artificial sequence
  VH CDR3
TTSYCNPKVCFDYWFDP

SEQ ID NO: 312 - protein, 20 aa, Artificial sequence
  VH CDR3
AKEYYYDSSGYYYREDAFDI

SEQ ID NO: 313 - protein, 12 aa, Artificial sequence
  VH CDR3
AKDGGLTAYLEY

SEQ ID NO: 314 - protein, 14 aa, Artificial sequence
  VH CDR3
ATEKWEVVDVCFDY

SEQ ID NO: 315 - protein, 20 aa, Artificial sequence
  VH CDR3
AKDIGWDVVVVAATHGVFDY

SEQ ID NO: 316 - protein, 17 aa, Artificial sequence
  VH CDR3
AKDPYYYGSGSSNFFDY

SEQ ID NO: 317 - protein, 15 aa, Artificial sequence
  VH CDR3
ARGPDYYDTGGYFDL

SEQ ID NO: 318 - protein, 14 aa, Artificial sequence
  VH CDR3
ARDGYKQIYWYLDL

SEQ ID NO: 319 - protein, 17 aa, Artificial sequence
  VH CDR3
AKGEGVYGSGSRYFLDY

SEQ ID NO: 320 - protein, 17 aa, Artificial sequence
  VH CDR3
AREWSRGAVAGTGYFDY

SEQ ID NO: 321 - protein, 15 aa, Artificial sequence
  VH CDR3
AKVAKLPGDYYGMDV

SEQ ID NO: 322 - protein, 10 aa, Artificial sequence
  VH CDR3
ARELRGAFDI

SEQ ID NO: 323 - protein, 11 aa, Artificial sequence
  VH CDR3
ARDWGEYYFDY

SEQ ID NO: 324 - protein, 11 aa, Artificial sequence
  VH CDR3
ARDYGDLYFDY

SEQ ID NO: 325 - protein, 17 aa, Artificial sequence
  VH CDR3
ARDRRVGSPYYYYYMDV

SEQ ID NO: 326 - protein, 11 aa, Artificial sequence
  VH CDR3
ARDLGDNAFDI

SEQ ID NO: 327 - protein, 10 aa, Artificial sequence
  VH CDR3
ARDRYSGYDF

SEQ ID NO: 328 - protein, 17 aa, Artificial sequence
  VH CDR3
ARLSGTGYGGDGGWFDP

SEQ ID NO: 329 - protein, 13 aa, Artificial sequence
  VH CDR3
AGKKIYYGSSFDP

SEQ ID NO: 330 - protein, 16 aa, Artificial sequence
  VH CDR3
ARGGSGSGWYGGRFDY

SEQ ID NO: 331 - protein, 19 aa, Artificial sequence
  VH CDR3
ARVWRETYYYDSSGDSFDY

SEQ ID NO: 332 - protein, 14 aa, Artificial sequence
  VH CDR3
ARGRSITGIRDVDF

SEQ ID NO: 333 - protein, 14 aa, Artificial sequence
  VH CDR3
ARGRGNYMFRWFDP

SEQ ID NO: 334 - protein, 17 aa, Artificial sequence
  VH CDR3
ARGGLWYDSINYYGMDV

SEQ ID NO: 335 - protein, 16 aa, Artificial sequence
  VH CDR3
ARLILRWPTTWDYFDY

SEQ ID NO: 336 - protein, 9 aa, Artificial sequence
  VH CDR3
ARVDGPFDY

SEQ ID NO: 337 - protein, 15 aa, Artificial sequence
  VH CDR3
ARCPFWNYGHCYLDN

SEQ ID NO: 338 - protein, 14 aa, Artificial sequence
  VH CDR3
ARPSVRWYYHAMDV

SEQ ID NO: 339 - protein, 21 aa, Artificial sequence
  VH CDR3
AKERRPVLRYFDWLPIEAPDY

SEQ ID NO: 340 - protein, 18 aa, Artificial sequence
  VH CDR3
ARGQYDILTGYQYGAFDI

SEQ ID NO: 341 - protein, 13 aa, Artificial sequence
  VH CDR3
AAHYYSRTDAFHI

SEQ ID NO: 342 - protein, 19 aa, Artificial sequence
  VH CDR3
ARDSVSGSGSYYKGLWFDP

SEQ ID NO: 343 - protein, 20 aa, Artificial sequence
  VH CDR3
VVGIGYCSSPSCPPLRWFDY

SEQ ID NO: 344 - protein, 17 aa, Artificial sequence
  VH CDR3
ARERGYSGSGSLYYFDY

SEQ ID NO: 345 - protein, 13 aa, Artificial sequence
  VH CDR3
AHYSSSRPPLFDY

SEQ ID NO: 346 - protein, 7 aa, Artificial sequence
  VH CDR3
AKGHWST

SEQ ID NO: 347 - protein, 18 aa, Artificial sequence
  VH CDR3
ANGAYYYGSGSYYNGAAY

SEQ ID NO: 348 - protein, 17 aa, Artificial sequence
  VH CDR3
AKGGYYDILTGYFPFDY

SEQ ID NO: 349 - protein, 11 aa, Artificial sequence
  VH CDR3
ARDLVVYGMDV

SEQ ID NO: 350 - protein, 11 aa, Artificial sequence
  VH CDR3
ARDPIRNGMDV

SEQ ID NO: 351 - protein, 11 aa, Artificial sequence
  VH CDR3
ARDLVVYGMDV

SEQ ID NO: 352 - protein, 11 aa, Artificial sequence
  VH CDR3
ARDAMSYGMDV

SEQ ID NO: 353 - protein, 11 aa, Artificial sequence
  VH CDR3
ARDRVVYGMDV

SEQ ID NO: 354 - protein, 11 aa, Artificial sequence
  VH CDR3
ARDAAVYGIDV

SEQ ID NO: 355 - protein, 11 aa, Artificial sequence
  VH CDR3
ARDLISRGMDV

SEQ ID NO: 356 - protein, 11 aa, Artificial sequence
  VH CDR3
ARDRVVYGMDV

SEQ ID NO: 357 - protein, 11 aa, Artificial sequence
  VH CDR3
ARDLVSYGMDV

SEQ ID NO: 358 - protein, 11 aa, Artificial sequence
  VH CDR3
ARDLVVYGMDV

SEQ ID NO: 359 - protein, 11 aa, Artificial sequence
  VH CDR3
ARDAQNYGMDV

SEQ ID NO: 360 - protein, 10 aa, Artificial sequence
  VH CDR3
ARDRGLVSDY

SEQ ID NO: 361 - protein, 9 aa, Artificial sequence
  VL CDR3
QQTYIIPYS

SEQ ID NO: 362 - protein, 9 aa, Artificial sequence
  VL CDR3
QQYYSYPYT

SEQ ID NO: 363 - protein, 10 aa, Artificial sequence
  VL CDR3
SSYAGSNNLV

SEQ ID NO: 364 - protein, 8 aa, Artificial sequence
  VL CDR3
QRYDSYRT

SEQ ID NO: 365 - protein, 9 aa, Artificial sequence
  VL CDR3
QQSYSTPYT

SEQ ID NO: 366 - protein, 9 aa, Artificial sequence
  VL CDR3
QQYDNLPLT

SEQ ID NO: 367 - protein, 9 aa, Artificial sequence
  VL CDR3
QQYATSPWT

SEQ ID NO: 368 - protein, 11 aa, Artificial sequence
  VL CDR3
AAWDDSLSSWG

SEQ ID NO: 369 - protein, 9 aa, Artificial sequence
  VL CDR3
QTWGTGTVV

SEQ ID NO: 370 - protein, 10 aa, Artificial sequence
  VL CDR3
QSADSSGTWV

SEQ ID NO: 371 - protein, 9 aa, Artificial sequence
  VL CDR3
QQRSDWTPT

SEQ ID NO: 372 - protein, 9 aa, Artificial sequence
  VL CDR3
QQFNSYPRT

SEQ ID NO: 373 - protein, 9 aa, Artificial sequence
  VL CDR3
CSYAGNTTF

SEQ ID NO: 374 - protein, 11 aa, Artificial sequence
  VL CDR3
STWDASLKEVL

SEQ ID NO: 375 - protein, 9 aa, Artificial sequence
  VL CDR3
MQGTHWPLT

SEQ ID NO: 376 - protein, 9 aa, Artificial sequence
  VL CDR3
QQYDSYPWT

SEQ ID NO: 377 - protein, 9 aa, Artificial sequence
  VL CDR3
QQLTTYPRT

SEQ ID NO: 378 - protein, 10 aa, Artificial sequence
  VL CDR3
QSADSSGTWV

SEQ ID NO: 379 - protein, 9 aa, Artificial sequence
  VL CDR3
QQFYSTPVT

SEQ ID NO: 380 - protein, 9 aa, Artificial sequence
  VL CDR3
QSYDGSNVV

SEQ ID NO: 381 - protein, 9 aa, Artificial sequence
  VL CDR3
QQYYSTPLT

SEQ ID NO: 382 - protein, 10 aa, Artificial sequence
  VL CDR3
QQYYDTPMYT

SEQ ID NO: 383 - protein, 9 aa, Artificial sequence
  VL CDR3
QQYNSYPYT

SEQ ID NO: 384 - protein, 10 aa, Artificial sequence
  VL CDR3
SSYTSSSTFV

SEQ ID NO: 385 - protein, 13 aa, Artificial sequence
  VL CDR3
QSADSSGTYSNWV

SEQ ID NO: 386 - protein, 10 aa, Artificial sequence
  VL CDR3
SSYTSSSTVV

SEQ ID NO: 387 - protein, 9 aa, Artificial sequence
  VL CDR3
QQYGSSPLT

SEQ ID NO: 388 - protein, 9 aa, Artificial sequence
  VL CDR3
QQYGSSPLT

SEQ ID NO: 389 - protein, 5 aa, Artificial sequence
  VL CDR3
QQYGA

SEQ ID NO: 390 - protein, 9 aa, Artificial sequence
  VL CDR3
QQYGSSPWT

SEQ ID NO: 391 - protein, 11 aa, Artificial sequence
  VL CDR3
AVWDDSLNGVV

SEQ ID NO: 392 - protein, 11 aa, Artificial sequence
  VL CDR3
SSFAGSNNPYV

SEQ ID NO: 393 - protein, 9 aa, Artificial sequence
  VL CDR3
QQYYSTPYT

SEQ ID NO: 394 - protein, 9 aa, Artificial sequence
  VL CDR3
HQYDSWPPT

SEQ ID NO: 395 - protein, 11 aa, Artificial sequence
  VL CDR3
QNRDDWPPLFT

SEQ ID NO: 396 - protein, 9 aa, Artificial sequence
  VL CDR3
QQYYSTPRT

SEQ ID NO: 397 - protein, 10 aa, Artificial sequence
  VL CDR3
QQAHSFLSLT

SEQ ID NO: 398 - protein, 12 aa, Artificial sequence
  VL CDR3
QSADTSGTYLWV

SEQ ID NO: 399 - protein, 9 aa, Artificial sequence
  VL CDR3
QQYDSLPIT

SEQ ID NO: 400 - protein, 8 aa, Artificial sequence
  VL CDR3
QQYYGIPT

SEQ ID NO: 401 - protein, 9 aa, Artificial sequence
  VL CDR3
QKCDNFPWT

SEQ ID NO: 402 - protein, 11 aa, Artificial sequence
  VL CDR3
AAWDDSLSVVV

SEQ ID NO: 403 - protein, 9 aa, Artificial sequence
  VL CDR3
QQSYSSPPT

SEQ ID NO: 404 - protein, 9 aa, Artificial sequence
  VL CDR3
QSYDDTLTI

SEQ ID NO: 405 - protein, 9 aa, Artificial sequence
  VL CDR3
QQSYGAPPT

SEQ ID NO: 406 - protein, 9 aa, Artificial sequence
  VL CDR3
QQSYSTPPT

SEQ ID NO: 407 - protein, 9 aa, Artificial sequence
  VL CDR3
QQSFSTPPT

SEQ ID NO: 408 - protein, 9 aa, Artificial sequence
  VL CDR3
QQSYSSPPT

SEQ ID NO: 409 - protein, 11 aa, Artificial sequence
  VL CDR3
YSTDSSGNHWV

SEQ ID NO: 410 - protein, 9 aa, Artificial sequence
  VL CDR3
LLSYSGVRI

SEQ ID NO: 411 - protein, 10 aa, Artificial sequence
  VL CDR3
QSYDSSLSKV

SEQ ID NO: 412 - protein, 10 aa, Artificial sequence
  VL CDR3
QAWDSSTFYV

SEQ ID NO: 413 - protein, 11 aa, Artificial sequence
  VL CDR3
GTWDSSLSAVV

SEQ ID NO: 414 - protein, 9 aa, Artificial sequence
  VL CDR3
QQYNNWPWT

SEQ ID NO: 415 - protein, 10 aa, Artificial sequence
  VL CDR3
LLSYSGARPV

SEQ ID NO: 416 - protein, 10 aa, Artificial sequence
  VL CDR3
QQSYSTPPYT

SEQ ID NO: 417 - protein, 11 aa, Artificial sequence
  VL CDR3
SSYTSSSTRVV

SEQ ID NO: 418 - protein, 9 aa, Artificial sequence
  VL CDR3
QQYYSTPIT

SEQ ID NO: 419 - protein, 9 aa, Artificial sequence
  VL CDR3
QQYGSSPLT

SEQ ID NO: 420 - protein, 11 aa, Artificial sequence
  VL CDR3
GTWDSSLSVVV

SEQ ID NO: 421 - protein, 11 aa, Artificial sequence
  VL CDR3
SSYTSSSTFAV

SEQ ID NO: 422 - protein, 9 aa, Artificial sequence
  VL CDR3
MQALQTPLT

SEQ ID NO: 423 - protein, 9 aa, Artificial sequence
  VL CDR3
MQALQTVFT

SEQ ID NO: 424 - protein, 9 aa, Artificial sequence
  VL CDR3
MQALQTVFT

SEQ ID NO: 425 - protein, 9 aa, Artificial sequence
  VL CDR3
QQTYIIPYS

SEQ ID NO: 426 - protein, 9 aa, Artificial sequence
  VL CDR3
QQYYSYPYT

SEQ ID NO: 427 - protein, 11 aa, Artificial sequence
  VL CDR3
QVWDSSSDHVV

SEQ ID NO: 428 - protein, 11 aa, Artificial sequence
  VL CDR3
QAWDSSTSYVV

SEQ ID NO: 429 - protein, 11 aa, Artificial sequence
  VL CDR3
GTWDSSLSVGV

SEQ ID NO: 430 - protein, 10 aa, Artificial sequence
  VL CDR3
NSYTSNSTAV

SEQ ID NO: 431 - protein, 9 aa, Artificial sequence
  VL CDR3
QQSYNWPRT

SEQ ID NO: 432 - protein, 9 aa, Artificial sequence
  VL CDR3
LQHNSYPYT

SEQ ID NO: 433 - protein, 9 aa, Artificial sequence
  VL CDR3
QQYNGYPHT

SEQ ID NO: 434 - protein, 8 aa, Artificial sequence
  VL CDR3
QQYSYYSA

SEQ ID NO: 435 - protein, 5 aa, Artificial sequence
  VL CDR3
QQYGT

SEQ ID NO: 436 - protein, 11 aa, Artificial sequence
  VL CDR3
SAWDSSLSAWV

SEQ ID NO: 437 - protein, 9 aa, Artificial sequence
  VL CDR3
QQYYSTPIT

SEQ ID NO: 438 - protein, 9 aa, Artificial sequence
  VL CDR3
QSFDDNDQV

SEQ ID NO: 439 - protein, 10 aa, Artificial sequence
  VL CDR3
LLYVGGGIWV

SEQ ID NO: 440 - protein, 8 aa, Artificial sequence
  VL CDR3
QQYNIWLT

SEQ ID NO: 441 - protein, 8 aa, Artificial sequence
  VL CDR3
MQGTLLLT

SEQ ID NO: 442 - protein, 11 aa, Artificial sequence
  VL CDR3
ETWDSSLDAVI

SEQ ID NO: 443 - protein, 11 aa, Artificial sequence
  VL CDR3
AAWDDSLSGRV

SEQ ID NO: 444 - protein, 10 aa, Artificial sequence
  VL CDR3
MQGTHWPHPT

SEQ ID NO: 445 - protein, 8 aa, Artificial sequence
  VL CDR3
MQGTPWPT

SEQ ID NO: 446 - protein, 8 aa, Artificial sequence
  VL CDR3
QQSGSSYT

SEQ ID NO: 447 - protein, 9 aa, Artificial sequence
  VL CDR3
MQSLPSGFT

SEQ ID NO: 448 - protein, 9 aa, Artificial sequence
  VL CDR3
MQSLDLPPT

SEQ ID NO: 449 - protein, 9 aa, Artificial sequence
  VL CDR3
QQGSSFPLT

SEQ ID NO: 450 - protein, 9 aa, Artificial sequence
  VL CDR3
QQYDSSPIT

SEQ ID NO: 451 - protein, 13 aa, Artificial sequence
  VL CDR3
NSRDSSGQLHVVV

SEQ ID NO: 452 - protein, 11 aa, Artificial sequence
  VL CDR3
NSRDNNDDLPL

SEQ ID NO: 453 - protein, 11 aa, Artificial sequence
  VL CDR3
SSYAGSNNLGV

SEQ ID NO: 454 - protein, 11 aa, Artificial sequence
  VL CDR3
QSYDSSLSGVV

SEQ ID NO: 455 - protein, 9 aa, Artificial sequence
  VL CDR3
QQYYSTPFT

SEQ ID NO: 456 - protein, 9 aa, Artificial sequence
  VL CDR3
MQGTHWPIT

SEQ ID NO: 457 - protein, 11 aa, Artificial sequence
  VL CDR3
SSYTSSSTLVV

SEQ ID NO: 458 - protein, 9 aa, Artificial sequence
  VL CDR3
QQSYSTPYT

SEQ ID NO: 459 - protein, 9 aa, Artificial sequence
  VL CDR3
CSYAGSYVV

SEQ ID NO: 460 - protein, 9 aa, Artificial sequence
  VL CDR3
QQSYSTLHT

SEQ ID NO: 461 - protein, 11 aa, Artificial sequence
  VL CDR3
NSRDSSGNHLV

SEQ ID NO: 462 - protein, 11 aa, Artificial sequence
  VL CDR3
QAWDTITHEEV

SEQ ID NO: 463 - protein, 9 aa, Artificial sequence
  VL CDR3
QQYNYYPVA

SEQ ID NO: 464 - protein, 9 aa, Artificial sequence
  VL CDR3
TQATQFPLT

SEQ ID NO: 465 - protein, 10 aa, Artificial sequence
  VL CDR3
QQSYSTPPYT

SEQ ID NO: 466 - protein, 12 aa, Artificial sequence
  VL CDR3
QSYDSSLSSPVV

SEQ ID NO: 467 - protein, 11 aa, Artificial sequence
  VL CDR3
AAWDDSLSGPV

SEQ ID NO: 468 - protein, 11 aa, Artificial sequence
  VL CDR3
NSRDSSGNHLV

SEQ ID NO: 469 - protein, 9 aa, Artificial sequence
  VL CDR3
QQYDNLPYT

SEQ ID NO: 470 - protein, 11 aa, Artificial sequence
  VL CDR3
GTWDSSLSAGV

SEQ ID NO: 471 - protein, 10 aa, Artificial sequence [sequence omitted]

SEQ ID NO: 472 - protein, 10 aa, Artificial sequence
  VL CDR3
QAWDSSTYVV

SEQ ID NO: 473 - protein, 9 aa, Artificial sequence
  VL CDR3
QQSYSSPPT

SEQ ID NO: 474 - protein, 9 aa, Artificial sequence
  VL CDR3
QQSYSSPPT

SEQ ID NO: 475 - protein, 9 aa, Artificial sequence
  VL CDR3
QQSYSSPPT

SEQ ID NO: 476 - protein, 10 aa, Artificial sequence
  VL CDR3
HHYGTSPPFT

SEQ ID NO: 477 - protein, 9 aa, Artificial sequence
  VL CDR3
QQYGSSPLT

SEQ ID NO: 478 - protein, 11 aa, Artificial sequence
  VL CDR3
QSADSSGTYYV

SEQ ID NO: 479 - protein, 9 aa, Artificial sequence
  VL CDR3
QQSYSTPRT

SEQ ID NO: 480 - protein, 9 aa, Artificial sequence
  VL CDR3
QAWDSSTVV

SEQ ID NO: 481 - protein, 9 aa, Artificial sequence
  VL CDR3
MQSIQLPLT

SEQ ID NO: 482 - protein, 9 aa, Artificial sequence
  VL CDR3
MQSIQLPFT

SEQ ID NO: 483 - protein, 8 aa, Artificial sequence
  VL CDR3
MQALQTYT

SEQ ID NO: 484 - protein, 12 aa, Artificial sequence
  VL CDR3
YSTDSSGNHRRV

SEQ ID NO: 485 - protein, 10 aa, Artificial sequence
  VL CDR3
SSYTSSSTLV

SEQ ID NO: 486 - protein, 12 aa, Artificial sequence
  VL CDR3
YSTDSSGNHRGV

SEQ ID NO: 487 - protein, 9 aa, Artificial sequence
  VL CDR3
QQYNSFPYT

SEQ ID NO: 488 - protein, 9 aa, Artificial sequence
  VL CDR3
QQRSNWPVT

SEQ ID NO: 489 - protein, 9 aa, Artificial sequence
  VL CDR3
LQHNSYPLT

SEQ ID NO: 490 - protein, 9 aa, Artificial sequence
  VL CDR3
LQHNSYPFT

SEQ ID NO: 491 - protein, 9 aa, Artificial sequence
  VL CDR3
QQYGTSAGT

SEQ ID NO: 492 - protein, 10 aa, Artificial sequence
  VL CDR3
QQYGNLPPFT

SEQ ID NO: 493 - protein, 9 aa, Artificial sequence
  VL CDR3
QQYYSTPLT

SEQ ID NO: 494 - protein, 8 aa, Artificial sequence
  VL CDR3
MQNRHLYT

SEQ ID NO: 495 - protein, 8 aa, Artificial sequence
  VL CDR3
MQNRHLYT

SEQ ID NO: 496 - protein, 9 aa, Artificial sequence
  VL CDR3
MQTLQTSIT

SEQ ID NO: 497 - protein, 9 aa, Artificial sequence
  VL CDR3
QQYGSSQYS

SEQ ID NO: 498 - protein, 9 aa, Artificial sequence
  VL CDR3
QQYGSSQYT

SEQ ID NO: 499 - protein, 8 aa, Artificial sequence
  VL CDR3
QHYDTLLT

SEQ ID NO: 500 - protein, 9 aa, Artificial sequence
  VL CDR3
QQYFDTPWT

SEQ ID NO: 501 - protein, 8 aa, Artificial sequence
  VL CDR3
MQNRQLYT

SEQ ID NO: 502 - protein, 10 aa, Artificial sequence
  VL CDR3
QQFDNLPPFT

SEQ ID NO: 503 - protein, 10 aa, Artificial sequence
  VL CDR3
QQSYSARMST

SEQ ID NO: 504 - protein, 9 aa, Artificial sequence
  VL CDR3
MQGTQWPWT

SEQ ID NO: 505 - protein, 10 aa, Artificial sequence
  VL CDR3
QQFDNSPPWT

SEQ ID NO: 506 - protein, 11 aa, Artificial sequence
  VL CDR3
QSADSSGTYVV

SEQ ID NO: 507 - protein, 10 aa, Artificial sequence
  VL CDR3
CSYAGSYTLV

SEQ ID NO: 508 - protein, 9 aa, Artificial sequence
  VL CDR3
QQSYSTPFT

SEQ ID NO: 509 - protein, 8 aa, Artificial sequence
  VL CDR3
MQGTHSYT

SEQ ID NO: 510 - protein, 11 aa, Artificial sequence
  VL CDR3
QAWDSSTASYV

SEQ ID NO: 511 - protein, 10 aa, Artificial sequence
  VL CDR3
SSYTSASTVV

SEQ ID NO: 512 - protein, 10 aa, Artificial sequence
  VL CDR3
SSYTSASTVV

SEQ ID NO: 513 - protein, 9 aa, Artificial sequence
  VL CDR3
MQGTHSPWT

SEQ ID NO: 514 - protein, 11 aa, Artificial sequence
  VL CDR3
GTWDSSLSAWV

SEQ ID NO: 515 - protein, 10 aa, Artificial sequence
  VL CDR3
QSADGRGDWV

SEQ ID NO: 516 - protein, 9 aa, Artificial sequence
  VL CDR3
QQYGSSQYS

SEQ ID NO: 517 - protein, 9 aa, Artificial sequence
  VL CDR3
QQYDSYSGT

SEQ ID NO: 518 - protein, 9 aa, Artificial sequence
  VL CDR3
ETWDSPYVV

SEQ ID NO: 519 - protein, 8 aa, Artificial sequence
  VL CDR3
QHYDSLLT

SEQ ID NO: 520 - protein, 10 aa, Artificial sequence
  VL CDR3
SSYTSSSTVV

SEQ ID NO: 521 - protein, 8 aa, Artificial sequence
  VL CDR3
MQALQTLT

SEQ ID NO: 522 - protein, 10 aa, Artificial sequence
  VL CDR3
QQYNSYPLFT

SEQ ID NO: 523 - protein, 9 aa, Artificial sequence
  VL CDR3
MQGTHWPMT

SEQ ID NO: 524 - protein, 10 aa, Artificial sequence
  VL CDR3
QQYGSSPMYT

SEQ ID NO: 525 - protein, 8 aa, Artificial sequence
  VL CDR3
QQANSFPA

SEQ ID NO: 526 - protein, 9 aa, Artificial sequence
  VL CDR3
QAWDSHTVV

SEQ ID NO: 527 - protein, 9 aa, Artificial sequence
  VL CDR3
QQYNSYSWT

SEQ ID NO: 528 - protein, 9 aa, Artificial sequence
  VL CDR3
QQYTSWPLT

SEQ ID NO: 529 - protein, 9 aa, Artificial sequence
  VL CDR3
QQYTSWPLT

SEQ ID NO: 530 - protein, 5 aa, Artificial sequence
  VL CDR3
YSPKV

SEQ ID NO: 531 - protein, 9 aa, Artificial sequence
  VL CDR3
QQYNILPHT

SEQ ID NO: 532 - protein, 9 aa, Artificial sequence
  VL CDR3
QQYYNAPLS

SEQ ID NO: 533 - protein, 9 aa, Artificial sequence
  VL CDR3
QQYYNAPLS

SEQ ID NO: 534 - protein, 8 aa, Artificial sequence
  VL CDR3
QQRSNWIT

SEQ ID NO: 535 - protein, 8 aa, Artificial sequence
  VL CDR3
QQRSNWIT

SEQ ID NO: 536 - protein, 11 aa, Artificial sequence
  VL CDR3
AAWDDSLNGPV

SEQ ID NO: 537 - protein, 9 aa, Artificial sequence
  VL CDR3
QQYGSSPQT

SEQ ID NO: 538 - protein, 10 aa, Artificial sequence
  VL CDR3
QQYNNWPPLT

SEQ ID NO: 539 - protein, 9 aa, Artificial sequence
  VL CDR3
QQYYSYSLT

SEQ ID NO: 540 - protein, 11 aa, Artificial sequence
  VL CDR3
CSYAGSSTFYV

SEQ ID NO: 541 - protein, 10 aa, Artificial sequence
  VL CDR3
QSADSSGTWV

SEQ ID NO: 542 - protein, 11 aa, Artificial sequence
  VL CDR3
QQYGSSPEMYT

SEQ ID NO: 543 - protein, 9 aa, Artificial sequence
  VL CDR3
HQYGSGLGT

SEQ ID NO: 544 - protein, 8 aa, Artificial sequence
  VL CDR3
MQSIQLRT

SEQ ID NO: 545 - protein, 11 aa, Artificial sequence
  VL CDR3
QQCSSWPLSLT

SEQ ID NO: 546 - protein, 10 aa, Artificial sequence
  VL CDR3
QQYNNWPPIT

SEQ ID NO: 547 - protein, 9 aa, Artificial sequence
  VL CDR3
QQSNSFPPT

SEQ ID NO: 548 - protein, 11 aa, Artificial sequence
  VL CDR3
QSYDISLSAYV

SEQ ID NO: 549 - protein, 9 aa, Artificial sequence
  VL CDR3
QQYNTYSLT

SEQ ID NO: 550 - protein, 9 aa, Artificial sequence
  VL CDR3
QQLNSYPPA

SEQ ID NO: 551 - protein, 9 aa, Artificial sequence
  VL CDR3
QQYYRTPLT

SEQ ID NO: 552 - protein, 9 aa, Artificial sequence
  VL CDR3
LQHHTYPLT

SEQ ID NO: 553 - protein, 8 aa, Artificial sequence
  VL CDR3
MQSIQLWS

SEQ ID NO: 554 - protein, 9 aa, Artificial sequence
  VL CDR3
LLSYSGPWV

SEQ ID NO: 555 - protein, 10 aa, Artificial sequence
  VL CDR3
SSYAGSNNYV

SEQ ID NO: 556 - protein, 10 aa, Artificial sequence
  VL CDR3
QQYDNLPSFT

SEQ ID NO: 557 - protein, 10 aa, Artificial sequence
  VL CDR3
CSYAGSYTLV

SEQ ID NO: 558 - protein, 10 aa, Artificial sequence
  VL CDR3
CSYAGSSTVV

SEQ ID NO: 559 - protein, 10 aa, Artificial sequence
  VL CDR3
QQSYNVPPWT

SEQ ID NO: 560 - protein, 9 aa, Artificial sequence
  VL CDR3
MQGTHWPWT

SEQ ID NO: 561 - protein, 10 aa, Artificial sequence
  VL CDR3
QSYDINLSAV

SEQ ID NO: 562 - protein, 9 aa, Artificial sequence
  VL CDR3
HQYHNSPWT

SEQ ID NO: 563 - protein, 9 aa, Artificial sequence
  VL CDR3
MQALQTPYT

SEQ ID NO: 564 - protein, 11 aa, Artificial sequence
  VL CDR3
QVWDSSSDHYV

SEQ ID NO: 565 - protein, 9 aa, Artificial sequence
  VL CDR3
QQYGSSPRT

SEQ ID NO: 566 - protein, 10 aa, Artificial sequence
  VL CDR3
QQYDNWLPYT

SEQ ID NO: 567 - protein, 10 aa, Artificial sequence
  VL CDR3
LLSYSGAYVL

SEQ ID NO: 568 - protein, 10 aa, Artificial sequence
  VL CDR3
QQYSNWPLYT

SEQ ID NO: 569 - protein, 12 aa, Artificial sequence
  VL CDR3
AAWDDSLNGPYV

SEQ ID NO: 570 - protein, 10 aa, Artificial sequence
  VL CDR3
SSYTSISTVL

SEQ ID NO: 571 - protein, 13 aa, Artificial sequence
  VL CDR3
QVWDGGSDDRGYV

SEQ ID NO: 572 - protein, 10 aa, Artificial sequence
  VL CDR3
SSFTSNGAWV

SEQ ID NO: 573 - protein, 9 aa, Artificial sequence
  VL CDR3
QQNYIRPYT

SEQ ID NO: 574 - protein, 9 aa, Artificial sequence
  VL CDR3
QQYDNLPIT

SEQ ID NO: 575 - protein, 10 aa, Artificial sequence
  VL CDR3
ATWDDSLNGV

SEQ ID NO: 576 - protein, 9 aa, Artificial sequence
  VL CDR3
QQYNNWPYT

SEQ ID NO: 577 - protein, 13 aa, Artificial sequence
  VL CDR3
GADHGSGSNFVYV

SEQ ID NO: 578 - protein, 10 aa, Artificial sequence
  VL CDR3
CSYAGSSTLV

SEQ ID NO: 579 - protein, 9 aa, Artificial sequence
  VL CDR3
QQHDSAPYT

SEQ ID NO: 580 - protein, 8 aa, Artificial sequence
  VL CDR3
QQYNSYVT

SEQ ID NO: 581 - protein, 9 aa, Artificial sequence
  VL CDR3
MQGKHLRWT

SEQ ID NO: 582 - protein, 11 aa, Artificial sequence
  VL CDR3
YSTDYSGNHGV

SEQ ID NO: 583 - protein, 9 aa, Artificial sequence
  VL CDR3
QQCSNWPNT

SEQ ID NO: 584 - protein, 10 aa, Artificial sequence
  VL CDR3
QSADSNDSWV

SEQ ID NO: 585 - protein, 11 aa, Artificial sequence
  VL CDR3
GTWDSSLSAGV

SEQ ID NO: 586 - protein, 9 aa, Artificial sequence
  VL CDR3
QQGHNFPWT

SEQ ID NO: 587 - protein, 9 aa, Artificial sequence
  VL CDR3
QQYGSLPLT

SEQ ID NO: 588 - protein, 9 aa, Artificial sequence
  VL CDR3
QQYGSLPLT

SEQ ID NO: 589 - protein, 11 aa, Artificial sequence
  VL CDR3
QSYDSSLSGWV

SEQ ID NO: 590 - protein, 9 aa, Artificial sequence
  VL CDR3
QQRRNWPLT

SEQ ID NO: 591 - protein, 9 aa, Artificial sequence
  VL CDR3
QHRSNWPYT

SEQ ID NO: 592 - protein, 11 aa, Artificial sequence
  VL CDR3
AAWDDSLNGVV

SEQ ID NO: 593 - protein, 9 aa, Artificial sequence
  VL CDR3
MQTTQFPRT

SEQ ID NO: 594 - protein, 11 aa, Artificial sequence
  VL CDR3
QSQDSSATYVV

SEQ ID NO: 595 - protein, 9 aa, Artificial sequence
  VL CDR3
QAWDSSIEV

SEQ ID NO: 596 - protein, 10 aa, Artificial sequence
  VL CDR3
QQYGSSPPWT

SEQ ID NO: 597 - protein, 11 aa, Artificial sequence
  VL CDR3
QSGDSSGTYVV

SEQ ID NO: 598 - protein, 9 aa, Artificial sequence
  VL CDR3
MQTTQFPRT

SEQ ID NO: 599 - protein, 9 aa, Artificial sequence
  VL CDR3
LQYNTYSYS

SEQ ID NO: 600 - protein, 8 aa, Artificial sequence
  VL CDR3
QQYNSYIT

SEQ ID NO: 601 - protein, 8 aa, Artificial sequence
  VL CDR3
QQYNSYVT

SEQ ID NO: 602 - protein, 11 aa, Artificial sequence
  VL CDR3
YSTDSSDNQRV

SEQ ID NO: 603 - protein, 9 aa, Artificial sequence
  VL CDR3
QHLKSYPLT

SEQ ID NO: 604 - protein, 9 aa, Artificial sequence
  VL CDR3
QQGHNFPWT

SEQ ID NO: 605 - protein, 9 aa, Artificial sequence
  VL CDR3
QQGHNFPWT

SEQ ID NO: 606 - protein, 7 aa, Artificial sequence
  VL CDR3
QQYHNFP

SEQ ID NO: 607 - protein, 10 aa, Artificial sequence
  VL CDR3
QSYDSSLSVV

SEQ ID NO: 608 - protein, 9 aa, Artificial sequence
  VL CDR3
QAWDSNTGV

SEQ ID NO: 609 - protein, 11 aa, Artificial sequence
  VL CDR3
QSYDSSLSGSV

SEQ ID NO: 610 - protein, 13 aa, Artificial sequence
  VL CDR3
QSVDNTGASPHVV

SEQ ID NO: 611 - protein, 8 aa, Artificial sequence
  VL CDR3
QQYHTYWT

SEQ ID NO: 612 - protein, 7 aa, Artificial sequence
  VL CDR3
QAWDSGT

SEQ ID NO: 613 - protein, 9 aa, Artificial sequence
  VL CDR3
QQYGSSPRT

SEQ ID NO: 614 - protein, 9 aa, Artificial sequence
  VL CDR3
QQYGSSPRT

SEQ ID NO: 615 - protein, 9 aa, Artificial sequence
  VL CDR3
QHYGTSPYT

SEQ ID NO: 616 - protein, 10 aa, Artificial sequence
  VL CDR3
QQYGSSTLVT

SEQ ID NO: 617 - protein, 10 aa, Artificial sequence
  VL CDR3
CSYAGSSLWV

SEQ ID NO: 618 - protein, 9 aa, Artificial sequence
  VL CDR3
QSYDSSFWV

SEQ ID NO: 619 - protein, 11 aa, Artificial sequence
  VL CDR3
GTWDSSLSAVV

SEQ ID NO: 620 - protein, 12 aa, Artificial sequence
  VL CDR3
YSTDRSGNHRGV

SEQ ID NO: 621 - protein, 13 aa, Artificial sequence
  VL CDR3
NSRDSSGNHLYWV

SEQ ID NO: 622 - protein, 12 aa, Artificial sequence
  VL CDR3
QSYDSSLSGHVV

SEQ ID NO: 623 - protein, 12 aa, Artificial sequence
  VL CDR3
GTWDSSLSAGGV

SEQ ID NO: 624 - protein, 11 aa, Artificial sequence
  VL CDR3
CSYAGSSTFVV

SEQ ID NO: 625 - protein, 11 aa, Artificial sequence
  VL CDR3
GTWDSSLSAVV

SEQ ID NO: 626 - protein, 9 aa, Artificial sequence
  VL CDR3
QQLNSYPPT

SEQ ID NO: 627 - protein, 9 aa, Artificial sequence
  VL CDR3
QQSYSTLWT

SEQ ID NO: 628 - protein, 9 aa, Artificial sequence
  VL CDR3
QQYGDSPET

SEQ ID NO: 629 - protein, 9 aa, Artificial sequence
  VL CDR3
QAWDSSTVV

SEQ ID NO: 630 - protein, 9 aa, Artificial sequence
  VL CDR3
QQYDNLPYT

SEQ ID NO: 631 - protein, 9 aa, Artificial sequence
  VL CDR3
QQYDNLPYT

SEQ ID NO: 632 - protein, 10 aa, Artificial sequence
  VL CDR3
QQRSNWPSIT

SEQ ID NO: 633 - protein, 9 aa, Artificial sequence
  VL CDR3
QQANSFPLA

SEQ ID NO: 634 - protein, 9 aa, Artificial sequence
  VL CDR3
QQSYSTPFG

SEQ ID NO: 635 - protein, 11 aa, Artificial sequence
  VL CDR3
LSYDSSLSGSV

SEQ ID NO: 636 - protein, 9 aa, Artificial sequence
  VL CDR3
QQFNNYPLT

SEQ ID NO: 637 - protein, 9 aa, Artificial sequence
  VL CDR3
QQYDNLPFT

SEQ ID NO: 638 - protein, 10 aa, Artificial sequence
  VL CDR3
SSYTSSSAYV

SEQ ID NO: 639 - protein, 11 aa, Artificial sequence
  VL CDR3
NSRDSSGNHVV

SEQ ID NO: 640 - protein, 10 aa, Artificial sequence
  VL CDR3
CSYAGSYPVV

SEQ ID NO: 641 - protein, 9 aa, Artificial sequence
  VL CDR3
SSYAGSNKV

SEQ ID NO: 642 - protein, 10 aa, Artificial sequence
  VL CDR3
QQYGSSGGYT

SEQ ID NO: 643 - protein, 9 aa, Artificial sequence
  VL CDR3
QQSYSTPYT

SEQ ID NO: 644 - protein, 9 aa, Artificial sequence
  VL CDR3
QQYGSSSWT

SEQ ID NO: 645 - protein, 9 aa, Artificial sequence
  VL CDR3
QQSYSTPYT

SEQ ID NO: 646 - protein, 11 aa, Artificial sequence
  VL CDR3
QAWDSSTANWV

SEQ ID NO: 647 - protein, 11 aa, Artificial sequence
  VL CDR3
SSFTDSSTLVV

SEQ ID NO: 648 - protein, 9 aa, Artificial sequence
  VL CDR3
QQSYSVPHT

SEQ ID NO: 649 - protein, 8 aa, Artificial sequence
  VL CDR3
QQYNNWLT

SEQ ID NO: 650 - protein, 10 aa, Artificial sequence
  VL CDR3
QQYNNWPPIT

SEQ ID NO: 651 - protein, 10 aa, Artificial sequence
  VL CDR3
QQYNNWPPIT

SEQ ID NO: 652 - protein, 10 aa, Artificial sequence
  VL CDR3
SSYAGTNKIL

SEQ ID NO: 653 - protein, 9 aa, Artificial sequence
  VL CDR3
QQSYSTPLT

SEQ ID NO: 654 - protein, 10 aa, Artificial sequence
  VL CDR3
SSYTSSSTWV

SEQ ID NO: 655 - protein, 9 aa, Artificial sequence
  VL CDR3
QQSYSTPYT

SEQ ID NO: 656 - protein, 9 aa, Artificial sequence
  VL CDR3
MQALQTPGT

SEQ ID NO: 657 - protein, 9 aa, Artificial sequence
  VL CDR3
MQALQTPGT

SEQ ID NO: 658 - protein, 8 aa, Artificial sequence
  VL CDR3
QQYNSYSA

SEQ ID NO: 659 - protein, 9 aa, Artificial sequence
  VL CDR3
QAWDRTTAT

SEQ ID NO: 660 - protein, 11 aa, Artificial sequence
  VL CDR3
QSYDSSLSGWV

SEQ ID NO: 661 - protein, 12 aa, Artificial sequence
  VL CDR3
SSYTSLNTLEVV

SEQ ID NO: 662 - protein, 9 aa, Artificial sequence
  VL CDR3
MQALQTPYS

SEQ ID NO: 663 - protein, 12 aa, Artificial sequence
  VL CDR3
QVWDSSSDRTVV

SEQ ID NO: 664 - protein, 11 aa, Artificial sequence
  VL CDR3
ASWDDKVRGWV

SEQ ID NO: 665 - protein, 9 aa, Artificial sequence
  VL CDR3
QQYGSSPWT

SEQ ID NO: 666 - protein, 9 aa, Artificial sequence
  VL CDR3
QQYNSYSRT

SEQ ID NO: 667 - protein, 9 aa, Artificial sequence
  VL CDR3
QQYNTSPLT

SEQ ID NO: 668 - protein, 11 aa, Artificial sequence
  VL CDR3
QSYDSSLSGSL

SEQ ID NO: 669 - protein, 11 aa, Artificial sequence
  VL CDR3
QSADSSGTYRV

SEQ ID NO: 670 - protein, 6 aa, Artificial sequence
  VL CDR3
QQYGRT

SEQ ID NO: 671 - protein, 12 aa, Artificial sequence
  VL CDR3
SSYTNIDTLEIV

SEQ ID NO: 672 - protein, 9 aa, Artificial sequence
  VL CDR3
LQHNSYPRT

SEQ ID NO: 673 - protein, 11 aa, Artificial sequence
  VL CDR3
QVWHSSFDPWV

SEQ ID NO: 674 - protein, 10 aa, Artificial sequence
  VL CDR3
QQSYSTPPTT

SEQ ID NO: 675 - protein, 9 aa, Artificial sequence
  VL CDR3
QQYNSYFPT

SEQ ID NO: 676 - protein, 12 aa, Artificial sequence
  VL CDR3
QVWDSSSDHYWV

SEQ ID NO: 677 - protein, 11 aa, Artificial sequence
  VL CDR3
GTWDSSLSAGV

SEQ ID NO: 678 - protein, 10 aa, Artificial sequence
  VL CDR3
QTWGTGPQVL

SEQ ID NO: 679 - protein, 8 aa, Artificial sequence
  VL CDR3
QQYDNLLT

SEQ ID NO: 680 - protein, 11 aa, Artificial sequence
  VL CDR3
QVWDSSGDHWV

SEQ ID NO: 681 - protein, 8 aa, Artificial sequence
  VL CDR3
QQRSNWLT

SEQ ID NO: 682 - protein, 10 aa, Artificial sequence
  VL CDR3
QQHDNLPSFT

SEQ ID NO: 683 - protein, 9 aa, Artificial sequence
  VL CDR3
QQYGSSPRT

SEQ ID NO: 684 - protein, 9 aa, Artificial sequence
  VL CDR3
QQYGSSPRT

SEQ ID NO: 685 - protein, 9 aa, Artificial sequence
  VL CDR3
LLYYGGAPV

SEQ ID NO: 686 - protein, 9 aa, Artificial sequence
  VL CDR3
QQLNSYPPA

SEQ ID NO: 687 - protein, 9 aa, Artificial sequence
  VL CDR3
QQYDNLPQT

SEQ ID NO: 688 - protein, 10 aa, Artificial sequence
  VL CDR3
CSYAGSSLWV

SEQ ID NO: 689 - protein, 9 aa, Artificial sequence
  VL CDR3
QSYDSSNQV

SEQ ID NO: 690 - protein, 9 aa, Artificial sequence
  VL CDR3
QQRSNWLFT

SEQ ID NO: 691 - protein, 11 aa, Artificial sequence
  VL CDR3
GTWDSSLSAGV

SEQ ID NO: 692 - protein, 9 aa, Artificial sequence
  VL CDR3
MQASQFPLT

SEQ ID NO: 693 - protein, 9 aa, Artificial sequence
  VL CDR3
CSFAGSNRE

SEQ ID NO: 694 - protein, 9 aa, Artificial sequence
  VL CDR3
QQYGSSPWT

SEQ ID NO: 695 - protein, 11 aa, Artificial sequence
  VL CDR3
GTWDSSLSAWV

SEQ ID NO: 696 - protein, 10 aa, Artificial sequence
  VL CDR3
QHYSSSAPIT

SEQ ID NO: 697 - protein, 9 aa, Artificial sequence
  VL CDR3
QQRNKWPGT

SEQ ID NO: 698 - protein, 9 aa, Artificial sequence
  VL CDR3
QQYGDSPYT

SEQ ID NO: 699 - protein, 9 aa, Artificial sequence
  VL CDR3
QQLNSYPLT

SEQ ID NO: 700 - protein, 10 aa, Artificial sequence
  VL CDR3
CTYAGSSTWV

SEQ ID NO: 701 - protein, 9 aa, Artificial sequence
  VL CDR3
QQSYSSPYT

SEQ ID NO: 702 - protein, 9 aa, Artificial sequence
  VL CDR3
QQANSFPRT

SEQ ID NO: 703 - protein, 9 aa, Artificial sequence
  VL CDR3
QQFNDYPLT

SEQ ID NO: 704 - protein, 11 aa, Artificial sequence
  VL CDR3
QSYDSSLSGSV

SEQ ID NO: 705 - protein, 8 aa, Artificial sequence
  VL CDR3
QQYSTYYT

SEQ ID NO: 706 - protein, 9 aa, Artificial sequence
  VL CDR3
MQGSHWPWT

SEQ ID NO: 707 - protein, 12 aa, Artificial sequence
  VL CDR3
AAWDDSLNGPWV

SEQ ID NO: 708 - protein, 10 aa, Artificial sequence
  VL CDR3
CSYAGSYTWV

SEQ ID NO: 709 - protein, 9 aa, Artificial sequence
  VL CDR3
QQLNSYPFT

SEQ ID NO: 710 - protein, 9 aa, Artificial sequence
  VL CDR3
QQYDNLPRT

SEQ ID NO: 711 - protein, 9 aa, Artificial sequence
  VL CDR3
QQLNSYPLT

SEQ ID NO: 712 - protein, 10 aa, Artificial sequence
  VL CDR3
QQSYSTPPDT

SEQ ID NO: 713 - protein, 9 aa, Artificial sequence
  VL CDR3
QQYDNLPPT

SEQ ID NO: 714 - protein, 10 aa, Artificial sequence
  VL CDR3
QQSYTTPLFT

SEQ ID NO: 715 - protein, 10 aa, Artificial sequence
  VL CDR3
QQLNGYPHSA

SEQ ID NO: 716 - protein, 9 aa, Artificial sequence
  VL CDR3
HQYDNLPPT

SEQ ID NO: 717 - protein, 9 aa, Artificial sequence
  VL CDR3
QQLNSYPLT

SEQ ID NO: 718 - protein, 10 aa, Artificial sequence
  VL CDR3
QQLNSNPPIT

SEQ ID NO: 719 - protein, 10 aa, Artificial sequence
  VL CDR3
QQSYSTPPYT

SEQ ID NO: 720 - protein, 9 aa, Artificial sequence
  VL CDR3
HQYDNLPRT

SEQ ID NO: 721 - protein, 121 aa, Artificial sequence
  VH
QVQLVESGGGVVQPGRSLRLSCAASGFTFSSYGMHWVRQAPGKGLEWVAVIWYDGSNKYYADSVKGRFTISRDNSKNTLYLQMNSLRAEDTAVYYCAREGVDTAMVGFDYWGQGTLVTVSS

SEQ ID NO: 722 - protein, 121 aa, Artificial sequence; identical to SEQ ID NO: 721
  VH

SEQ ID NO: 723 - protein, 123 aa, Artificial sequence
  VH
EVQLVQSGAEVKKPGESLRISCKGSGYSFTSYWISWVRQMPGKGLEWMGRIDPSDSYTNYSPSFQGHVTISADKSISTAYLQWSSLKASDTAMYYCARSTRRWLQFVFPFDYWGQGTLVTVSS

SEQ ID NO: 724 - protein, 123 aa, Artificial sequence; identical to SEQ ID NO: 723
  VH

SEQ ID NO: 725 - protein, 123 aa, Artificial sequence; identical to SEQ ID NO: 723
  VH

SEQ ID NO: 726 - protein, 123 aa, Artificial sequence; identical to SEQ ID NO: 723
  VH

SEQ ID NO: 727 - protein, 123 aa, Artificial sequence; identical to SEQ ID NO: 723
  VH

SEQ ID NO: 728 - protein, 125 aa, Artificial sequence
  VH
QMQLQESGPGLVEPSETLALTCTVSGGSINRNHFWAWLRRPPGKGLEWIGSASYTGTTHDNPSLRSRLTISVDTSKNQFSLKMTSVTVADTAVYFCARQAPGGGLLGYYHGLDVWGQGTTVTVSP

SEQ ID NO: 729 - protein, 125 aa, Artificial sequence; identical to SEQ ID NO: 728
  VH

SEQ ID NO: 730 - protein, 129 aa, Artificial sequence
  VH
QVQLVQSGAEVKKPGASVKVSCKASGYTFTSYGISWVRQAPGQGLEWMGWISAYNGNTNYAQKLQGRVTMTTDTSTSTAYMELRSLRSDDTAVYYCARDRYCGGDCSGPHYYYYGMDVWGQGTTVTVSS

SEQ ID NO: 731 - protein, 127 aa, Artificial sequence
  VH
EVQLVESGGGLVQPGGSLRLSCAASGFTFSYFEMNWVRQAPGKGLEWISYISSSGTNIYYADSVKGRFTISRDNAENSLYLQMNSLRVEDTAVYYCARWDCSGGSCNYYYYYNMDVWGQGTRVTVSS

SEQ ID NO: 732 - protein, 127 aa, Artificial sequence; identical to SEQ ID NO: 731
  VH

SEQ ID NO: 733 - protein, 128 aa, Artificial sequence
  VH
QVQLVQSGAEVKKPGASVKVSCKASGYKFSNYYIHWVRQAPGQGLEWMGWINPYSGETNYAQKFQGRVTMTRDTSTSTAYMELSRLRADDTAVFFCAREDILLVPAASNFYYFGMDVWGQGTTVAVSS

SEQ ID NO: 734 - protein, 127 aa, Artificial sequence
  VH
QVQLVQSGAEVRKPGASVKISCKSSGYIFTNFYVDWVRQAPGRGLEWMGRVNPNDGSSIYAQKFRDRFSLTSDTSTSTVFLNLRGLTSEDTALYFCARGDYYDPDDRYNAYYSLGAWGQGTTVIVSS

SEQ ID NO: 735 - protein, 117 aa, Artificial sequence
  VH
EVQLLESGGGLQQRGGSLRLSCAASGFNFSSYAMSWVRQAPGKGLEWVSSISATGGTTFYADSEKGRFTISRDNSKNILYLQMNSLRAEDTAVYYCTKGSMLLEVYWGQGTLVTVSS

SEQ ID NO: 736 - protein, 123 aa, Artificial sequence
  VH
EVQLVESGGGLVQPGGSLRLSCGVSGIIVSRNEMSWVRQAPGKGLEWVSYISSSGTGVHYADSVKGRFTSSRDSAKNSVYLQMHSLRAEDTAVYYCARAPSDSSGINGAFDIWGQGTMVTVSS

SEQ ID NO: 737 - protein, 122 aa, Artificial sequence
  VH
QVQLVQSGAEVKKPGSSVKVSCKASGGTFSTYAISWVRQAPGQGLEWMGGIIPIFGTPTYAQRFQGRVTITADESTSTAYMELTSLRSDDTAVFYCARPKAPGYSYLSLDYWGQGTLVTVSS

SEQ ID NO: 738 - protein, 122 aa, Artificial sequence
  VH
QVQLVESGGGVVQPGRSLRLSCAASGFTFSSYGMHWVRQAPGKGLEWVAVISYDGSNKYYADSVKGRFTISRDNSKNTLYLQMNSLRAEDTAVYYCCGFGVVTTDAYGMDVWGQGTTVTVSS

SEQ ID NO: 739 - protein, 126 aa, Artificial sequence
  VH
EVQLVESGGGLVQPGGSLRLSCSASGFTFNNYAMHWVRQAPGKGLEHVSVISSYGDNTFYADSVKGRFTISRDNSKNTLYLQMSSLRAEDTAVYYCVKDKACTTTSCYEGTFFDYWGQGTLVTVSS

SEQ ID NO: 740 - protein, 121 aa, Artificial sequence
  VH
EVQLVESGGGLVQPGGSLRLSCAASGFVFSNYWMTWVRQAPGKGLEWVANIKQDESEEYYRDSLKGRFTISRDNAKNSVFLQMDSLRVEDSAVYYCVRGDDSILTPTFDHWGQGTLVTVSS

SEQ ID NO: 741 - protein, 123 aa, Artificial sequence
  VH
QVQLQESGPGLVKPSQTLSLTCTVSGGSISSGGYYWSWIRQHPGKGLEWIGYIYYSGSTYYNPSLKSRVTISVDTSKNQFSLKLSSVTAADTAVYYCARAGKGFMVITHFDYWGQGTLVTVSS

SEQ ID NO: 742 - protein, 120 aa, Artificial sequence
  VH
EVELVQSGAEMKEPGESLKISCKGFGYNFNNYWVAWVRQTPGKGLEWMGIIYGGDSDTRYNPSMQGQVTISADKSINTIYLEWDVLRASDSGIYYCARPHTNSWDQFDYWGQGTLVTVSS

SEQ ID NO: 743 - protein, 126 aa, Artificial sequence
  VH
QVQLVQSGSELKKPGASVKVSCKASGYTFTSYAMNWVRQAPGQGLEWMGWINTNTGNPTYAQGFTGRFVFSLDTSVSTAYLQISSLKAEDTAVYYCARPQGGSSWYRDYYYGMDVWGQGTTVTVSS

SEQ ID NO: 744 - protein, 126 aa, Artificial sequence
  VH
QVQLVQSGAEVKKPGASVKVSCKVSGYTLTELSMHWVRQAPGKGLEWMGGFDPEDGETIYAQKFQGRVTMTEDTSTDTAYMELSSLRSEDTAVYYCATSTAVLRYFAPTGGWFDPWGQGTLVTVSS

SEQ ID NO: 745 - protein, 122 aa, Artificial sequence
  VH
QVQLVESGGGVVQPGRSLRLSCAASGFTFSSYGMHWVRQAPGKGLEWVAVISYDGSNKYYADSVKGRFTISRDNSKNTLYLQMNSLRAEDTAVYYCAKDNGHSYGYSWFDPWGQGTLVTVSS

SEQ ID NO: 746 - protein, 123 aa, Artificial sequence
  VH
QVQLVESGGGVVQPGRSLRLSCAASGFTFSSYPMHWVRQAPGKGLEWVAVISYDGSNKYYADSVKGRFTISRDNSKNTLYLQMNSLRAEDTAVYYCATDGATIPINYYGMDVWGQGTTVTVSS

SEQ ID NO: 747 - protein, 124 aa, Artificial sequence
  VH
QVQLQESGPGLVKPSQTLSLTCTVSGGSISSGGYYWSWIRQHPGKGLEWIGYIYYSGSTYYNPSLKSRVTISVDTSKNQFSLKLSSVTAADTAVYYCARSPITMIVVVNAFDIWGQGTMVTVSS

SEQ ID NO: 748 - protein, 124 aa, Artificial sequence
  VH
QVQLQESGPGLVKPSQTLSLTCTVSGGSISSGGYYWSWIRQHPGKGLEWIGYIYYSGSTYYNPSLKSRVTISVDTSKNQFSLKLSSVTAADTAVYYCARARITMIVVVNHFDYWGQGTLVTVSS

SEQ ID NO: 749 - protein, 121 aa, Artificial sequence
  VH
EVQLVESGGRSVQPGGSLRLSCEASGFTVSSNYMNWVRQAPGKGLEWLSVLYSGGNEYYADSVRGRFTISRHSSKNTLFLQMNRLRPEDTAVYYCARVQSTGYKYWYFDIWGRGTLVIVSS

SEQ ID NO: 750 - protein, 112 aa, Artificial sequence
  VH
QVQLQESGPGLVKPSETLSLTCTVSGGSISSYYWSWIRQPPGKGLEWIGYIYYSGSTNYNPSLKSRVTISVDTSKNQFSLKLSSVTAADTAVYYCARGFDYWGQGTLVTVSS

SEQ ID NO: 751 - protein, 121 aa, Artificial sequence
  VH
QVQLVQSGAEVKKPGASVKVSCKASGYTFTGYFIYWVRQAPGQGLEWMGRINPSSGVANYAQKFQGRVTMTRDTSITTAYMELSRLTSDDTVVYYCARARDYGSGSPMDVWGQGTTVTVSS

SEQ ID NO: 752 - protein, 125 aa, Artificial sequence
  VH
EVQLVESGGGLVQPGGSLRLSCVASGFTASSNYMNWVRQAPGKGLEWVSVIYAGGGTHYADSVKGRFTISRDNFKNTVYLQMNSLRSEDTAVYYCARDGVYYGSVIYHHYDLHVWGQGTTVTVSS

SEQ ID NO: 753 - protein, 121 aa, Artificial sequence
  VH
QVQLVQSGPEVKKPGSSVKVSCKVSGGTFSSYGISWVRLAPGRGLEWMGRILPVLDTTTYAPKFEGRVTITADESTTTAYMELTSLKSDDTAVYYCARGGGELLRYPFDYWGQGTPVTVSS

SEQ ID NO: 754 - protein, 124 aa, Artificial sequence
  VH
QVHLVQSGPEVKKPGSSVKVSCKASGGRFGSFAFSWLRQAPGQGLEWMGKVTPIVGVPVYAEKFQGTVTISADESTNTAYMEVSSLRSEDTALYYCAKAGLGLETSGGNYFESWGQGTLVTVSS

SEQ ID NO: 755 - protein, 119 aa, Artificial sequence
  VH
QVRLVESGGGLVQPGRSLRLSCAASGFTFTDYAIHWVRQAPGKGLEWMATISYDGNDKYFAASVRGRFSISRDNSNNTLFLQMNNLRAEDTAVYYCAKDRVTMNYFDYWGQGTLVSVSS

SEQ ID NO: 756 - protein, 121 aa, Artificial sequence
  VH
QVQLQESGPGLVKPSETLSLTCTVSGGSISSYYWSWIRQPPGKGLEWIGYIYYSGSTNYNPSLKSRVTISVDTSKNQFSLKLSSVTAADTAVYYCARVREGYTSGWYADYWGQGTLVTVSS

SEQ ID NO: 757 - protein, 125 aa, Artificial sequence
  VH
QVQLVQSGAEVQKPGASVRVSCKASGYTFTDYYIHWVRQAPGQGLEWMGWVNPNRGGTNNAQKFQGRVTMTRDTSITTAYMELHSLRSDDTAVYYCARDRSYYHSSGYHYYFDYWGQGSLVTVSS

SEQ ID NO: 758 - protein, 122 aa, Artificial sequence
  VH
QVQLVQSGAEVKKPGASVKVSCKASGYSFTGHYIHWVRQAPGQGLEWMGWINPDSGGTNNAQKFQGRVTMARDTSISTAYMDLSTLTNDDTAVYYCVRDRIVGGYSYGGDYWGQGTLVTVSS

SEQ ID NO: 759 - protein, 115 aa, Artificial sequence
  VH
EVQLLESGGGLVQPGGSLRLSCAASGFTFSNYGMSWVRQAPGKGLEWVSAITGSGGSTHYADSVKGRFTISRDNSNNTLSLQMNSLRAEDTAVYYCAKGRLSPRLGQGTLVTVSS

SEQ ID NO: 760 - protein, 120 aa, Artificial sequence
  VH
QLQLKESGSGLVKSSQTLSLTCAVSGGSISSDVYSWSWIRQAPGKGLEYIGYVFHTGSAYYNPSLKSRVIISVDRSKNQVSLNVTSVTAADTAIYYCARVKVDNVVFDLWGQGTMVTVSS

SEQ ID NO: 761 - protein, 123 aa, Artificial sequence
  VH
QVQLVQSGTEVKKPGSSVKVSCKASGDTFNSYAISWVRQAPGQGLEWMGRIIPILRLATYAQEFQGRVTITADKSTTTTYMEVTSLKSEDTAIYYCARDRGLAARPAGWVDLWGQGTLVTVSS

SEQ ID NO: 762 - protein, 121 aa, Artificial sequence
  VH
QTQLVESGGGVVQPGRSLRLSCAASGFTFSHYGMHWVRQAPGKGLEWVALIWYDGSKKYYADSVKGRFTISRDISENTLYLQMNSLRAEDTAVYYCARENFHFSGTPPLYWGQGTLVTVSS

SEQ ID NO: 763 - protein, 129 aa, Artificial sequence
  VH
EVQLVQSAAEQKKPGESLKLSCKGSGYSFPAHWIDWVRQMPGGGLEWVGSIFPGDSDTKYSPSFEGQVNISADRSINTAYLQWSSLKASDTAIYYCARKYTYDTSGFFLSSSRNAFDVWGQGSMVFVSS

SEQ ID NO: 764 - protein, 117 aa, Artificial sequence
  VH
EVQLVQSGAEVKKPGESLKISCKGSGYNFDTYWIAWVRQTPGKGLEWMGDIYPGDSDSRYSPSFQGRVTFSADKSISVAYLQWSTLKASDTAMYFCARLGSNGYGLWGQGTLITVSS

SEQ ID NO: 765 - protein, 129 aa, Artificial sequence
  VH
EVQLVQSGAEVKEPGESLKISCKGSGYSFSGYWIAWVRQRPGKGLEWMGTIFPSDSDTRYSPSFEGQVTISTDKSISTAYLQWSSLKASDTAMYYCARTYSYDSSGFFLTSSREAFDIWGQGTMVIVSS

SEQ ID NO: 766 - protein, 129 aa, Artificial sequence
  VH
EVQLVQSGAEVKKPGESLKISCKASGYYFAAHWIDWVRQMPGRGLEWMGSIFPSDSDTEYGPSFQGQVNISADKSITTAYLQLKNLKASDTALYYCVRKYSFDVSGFFLSSSRHAFDVWGQGTMVTVSS

SEQ ID NO: 767 - protein, 129 aa, Artificial sequence
  VH
EVHLVQSGPEQKKPGESLRISCKGSGYSFPAFWIVWVRQMPGEGLEWMGSVFPGDSDTEYSPSFQGQVTISADKSISTAYLQWSSLKASDTAMYYCARKYSYDTSGFFLTSSRDAFDVWGQGTMIAVSS

SEQ ID NO: 768 - protein, 129 aa, Artificial sequence
  VH
DVQLVQSGAEEKKPGEFLKISCKGSGYSFPAYWIGWVRQMPGKGLEWMGSIFPGDSDTEYSPSFQGHVTISADKSISTAYLQWSSLKASDTAMYYCVRKFSYDISGFFLTSSRDAFDVWGQGTKVTISS

SEQ ID NO: 769 - protein, 112 aa, Artificial sequence
  VH
QVQLVQSGAEVKKPGASVKVSCKVSGYTLTELSMHWVRQAPGKGLEWMGGFDPEDGETIYAQKFQGRVTMTEDTSTDTAYMELSSLRSEDTAVYYCATEGVWGQGTTVTVSS

SEQ ID NO: 770 - protein, 119 aa, Artificial sequence
  VH
QVQLVQSGAEAKKPGASVKVSCKASGYTFTRYWMHWVRQGPGQGLEWMGLMKPGDGKTIYAQKFQYRVTLTRDTSTSTVYMELRSLTSADTAMYYCLLIEGMGATSGDWGQGTLVTVSS

SEQ ID NO: 771 - protein, 120 aa, Artificial sequence
  VH
EVQLVESGGGLVKPGGSLRLSCAASGFTFSSYSMNWVRQAPGKGLEWVSSISSSSSYIYYADSVKGRFTISRDNAKNSLYLQMNSLRAEDTAVYYCATTNDGYYYGMDVWGQGTTVTVSS

SEQ ID NO: 772 - protein, 125 aa, Artificial sequence
  VH
EVQLVESGGGLVQPGGSLRLSCAASGFTFSSYSMNWVRQAPGKGLEWVSYISSSSSTIYYADSVKGRFTISRDNAKNSLYLQMNSLRAEDTAVYYCATNPHNTAMVLDYYGMDVWGQGTTVTVSS

SEQ ID NO: 773 - protein, 129 aa, Artificial sequence
  VH
QLQLQESGPGLVKPSETLSLTCTVSGGSISSSSYYWGWIRQPPGKGLEWIGSIYYSGSTYYNPSLKSRVTISVDTSKNQFSLKLSSVTAADTAVYYCAGAYIAAAGWGWELFQYYFDYWGQGTLVTVSS

SEQ ID NO: 774 - protein, 121 aa, Artificial sequence
  VH
QITLKESGPTLVKPTQTLTLTCTFSGFSLSTSGVGVGWIRQPPGKALEWLALIYWDDDKRYSPSLKSRLTITKDTSKNQVVLTMTNMDPVDTATYYCAHQAPFEWFGVDYWGQGTLVTVSS

SEQ ID NO: 775 - protein, 134 aa, Artificial sequence
  VH
EVQLVESGGGLVKPGGSLRLSCAASGFTFSNAWMSWVRQAPGKGLEWVGRIKSKTDGGTTDYAAPVKGRFTISRDDSKNTLYLQMNSLKTEDTAVYYCTTDGLYCSGGSCYYHSYYYYYGMDVWGQGTTVTVSS

SEQ ID NO: 776 - protein, 128 aa, Artificial sequence
  VH
EVQLVESGGGLVQPGGSLRLSCAASGFTFSSYEMNWVRQAPGKGLEWVSYISSSGSTIYYADSVKGRFTISRDNAKNSLYLQMNSLRAEDTAVYYCARDGLGNYDILTGYTERAFDIWGQGTMVTVSS

SEQ ID NO: 777 - protein, 126 aa, Artificial sequence
  VH
EVQLVESGGGLVQPGGSLRLSCAASGFTFSSYEMNWVRQAPGKGLEWVSYISSSGSTIYYADSVKGRFTISRDNAKNSLYLQMNSLRAEDTAVYYCARVKPILRVVVVAATPCDYWGQGTLVTVSS

SEQ ID NO: 778 - protein, 133 aa, Artificial sequence
  VH
QLQLQESGPGLVKPSETLSLTCTVSGGSISSSSYYWGWIRQPPGKGLEWIGSIYYSGSTYYNPSLKSRVTISVDTSKNQFSLKLSSVTAADTAVYYCARHARGYQLLSPRLGELSLYRSFDYWGQGTLVTVSS

SEQ ID NO: 779 - protein, 126 aa, Artificial sequence
  VH
QVQLQESGPGLVKPSQTLSLTCTVSGGSISSGGYYWSWIRQHPGKGLEWIGYIYYSGSTYYNPSLKSRVTISVDTSKNQFSLKLSSVTAADTAVYYCARATTTKMIVVVINAFDIWGQGTMVTVSS

SEQ ID NO: 780 - protein, 127 aa, Artificial sequence
  VH
QLQLQESGPGLVKPSETLSLTCTVSGGSISSRSYYWGWIRQPPGKGLEWIGSIYYSGSTYYNPSLKSRVTISVDTSKNQFSLKLSSVTAADTAVYYCARHWITMIVVVIKGGWFDPWGQGTLVTVSS

SEQ ID NO: 781 - protein, 126 aa, Artificial sequence
  VH
QVTLKESGPVLVKPTETLTLTCTVSGFSLSNARMGVSWIRQPPGKALEWLAHIFSNDEKSYSTSLKSRLTISKDTSKSQVVLTMTNMDPVDTATYYCARIRGQWLVGKYYYGMDVWGQGTTVTVSS

SEQ ID NO: 782 - protein, 122 aa, Artificial sequence
  VH
QITLKESGPTLVKPTQTLTLTCTFSGFSLSTSGVGVGWIRQPPGKALEWLALIYWDDDKRYSPSLKSRLTITKDTSKNQVVLTMTNMDPVDTATYYCAHRGWGFSSSFFDYWGQGTLVTVSS

SEQ ID NO: 783 - protein, 122 aa, Artificial sequence
  VH
QVQLVESGGGVVQPGRSLRLSCAASGFTISPYGMHWVRQAPGKGLECVAIIWYDGSNKYYADSVKGRFTISRDSSKNTLYLQMDRLRAEDTAVYYCARMSSSLQHYYGMDVWGQGTTVTVSS

SEQ ID NO: 784 - protein, 122 aa, Artificial sequence
  VH
QVQLVESGGGVVQPGRSLRLSCAASGFTISPYGMHWVRQAPGKGLECVAIIWYDGSNKYYADSVKGRFTISRDSSKNTLYLQMDRLRAEDTAVYFCARMSSSLQHYYGMDVWGQGTTVTVSS

SEQ ID NO: 785 - protein, 124 aa, Artificial sequence
  VH
QVQVVQSEGEVKKPGASVKVSCMASGYTFGDYGISWVRQAPGQGLEWMGWISGYNGDPKYAQKFQGRITLTTDAATSSAYMELRSLRSDDTAVYFCARDVTLVRGTASPRFDYWGQGTLITVSS

SEQ ID NO: 786 - protein, 124 aa, Artificial sequence; identical to SEQ ID NO: 785
  VH

SEQ ID NO: 787 - protein, 122 aa, Artificial sequence
  VH
QITLKESGPTLVKPTQTLTLTCTFSGFSLSTSGVGVGWIRQPPGKALEWLALIYWDDDKRYSPSLKSRLTITKDTSKNQVVLTMTNMDPVDTATYYCAQEGRNYDRNWFDPWGQGTLVTVSS

SEQ ID NO: 788 - protein, 117 aa, Artificial sequence
  VH
QVRLQESGPGLVKPSETLSLTCTVSGGSISTYRWSWIRQPPGKGLEWIGYIYYSGRTNYHPSLKSRVTMSVDTSKNQFSLKLTFVSAADTAVYYCARLIPIDGRDVWGRGTTVTVSS

SEQ ID NO: 789 - protein, 121 aa, Artificial sequence
  VH
EVQLVESGGGLVEPGGSLRLSCAASGFTFSNAWMCWVRQAPGKGLEWVGRIKRIIDGGTINYAAPVKGRFTISRDDSTNTVYLQMNSLRSEDTAVYYCTTYWDQYTSTWTWGQGTLVTVSS

SEQ ID NO: 790 - protein, 122 aa, Artificial sequence
  VH
QVQLVQSGSELKKPGASVKVSCKASGYIFTNYAINWVRQAPGQGLEWMGWTNTNTGNPTYAQGFTGRFVFSLDTSVSTAYLQISSLKAEDTAVYYCASIVKYDSSGYNFDYWGQGTLVTVSS

SEQ ID NO: 791 - protein, 121 aa, Artificial sequence
  VH
QVQLVQSGAEVKKPGASVKLSCKTSGYAFTSYQVHWVRQAPGQGLEWMGMINPSGSATHYAQKWQGRVSMTADTSTTTVYMELSGLRSEDTAVYYCTRDPWHESEHRFDPWGQGTLVTVSS

SEQ ID NO: 792 - protein, 121 aa, Artificial sequence
  VH
EVQLVESGGGLVQPGRSLRLSCAASGFTFGDYAMHWVRQVPGKGLEWVSSITWNSGNIGYADSVKGRFTISRDNAKNSLYLQMNSLRIEDTALYYCAKDNKVSSWYSFDIWGQGTMVTVSS

SEQ ID NO: 793 - protein, 115 aa, Artificial sequence
  VH
QVQLQQWGAGLLKPSETLSLTCAVSGASFSSYYWTWIRQPPGKGLEWIGDISQSASTNYSPSLKSRVTISADASRTQFSLNLISVTAADTAVYYCARGLGYYVALGQGTLVTVSS

SEQ ID NO: 794 - protein, 125 aa, Artificial sequence
  VH
EVQLVQSGVEVKEPGESLKISCKSSGYSFTKYWIGWVRQMPGKGLEWLGIIYPDDSETRYSPSFRGQVTISADKSISTAYLAWDRLKASDTAIYYCVRGGQEVSLRRLDWFVGYWGQGTLVTVSS

SEQ ID NO: 795 - protein, 120 aa, Artificial sequence
  VH
EVQLLESGGGLVQPGGSLRLSCAASGFTFSSYAMSWVRQAPGKGLEWVSSISGSGDKTYYADSVKGRFTISRDNSKNTLYLQMNSLRAEDTALYYCAKERGGSGKMYDYWGQGNLVTVSS

SEQ ID NO: 796 - protein, 128 aa, Artificial sequence
  VH
QVQLQQSGPGLLKPSQTLSLTCAISGDSVSSNTVAWSWIRQSPSRGLEWLGRTYYRSNWYNDYAVSVKGRITLNSDTSKNQLSLQLNSVTPEDTAVYYCARRGAAVAGTTGGSAFDIWGQGTMVTVSS

SEQ ID NO: 797 - protein, 124 aa, Artificial sequence
  VH
EVQLVESGGGLVQPGRSLRLSCAASGFTFDDYGMNWVRQAPGKGLEWVSGISWNSNSVAYADSVNGRFTISRDNAKNSLYLQMNSLRIEDTAFYYCTKTSDLLYYGSGSYLPYWGQGTLVVVSS

SEQ ID NO: 798 - protein, 115 aa, Artificial sequence
  VH
AVQLVESGGGFVQPGRSLRLSCAGSGFAFDDFAMHWVRQAPGKGLEWVSGINWNSDNIAYAASVKGRFIVSRDNGKNSLYLQMNSLRPEDTALYYCTRDGGAWDWGRGTLVTVSS

SEQ ID NO: 799 - protein, 124 aa, Artificial sequence
  VH
EVQVVESGGGLVQPGGSLRLSCAASGFTVSSTFMSWVRQAPGKGLEWVSVIYTVGDTFYADSVKGRFTISRHTSNNALYFQMNSLRTEDTAVYYCARGIPREYTTRWENAFDIWGQGTMVTVSS

SEQ ID NO: 800 - protein, 126 aa, Artificial sequence
  VH
QVQLQESGSGLVKPSQTLSLTCSVSGGSIKRRGYYWSWIRQHPGKGLEWIGYIYYSGTTYYNPSLQSRVNISVDTSKNQFSLNLRSVTAADTAVYYCARDRGADKDSNSGDVFDIWGQGTMVTVSS

SEQ ID NO: 801 - protein, 113 aa, Artificial sequence
  VH
QVQLQQWGAGLLKPSETLSLTCAVYGGSFSAYYWSWIRQPPGKGLEWIGEINRRGNTNYNPSLKGRVTISIHTSKNQFSLNLSSMTAADTAVYYCVGPQGAYWGQGTLVTVSS

SEQ ID NO: 802 - protein, 123 aa, Artificial sequence
  VH
QLQLQESGPGLVKPSETLSLTCVVSGGSISSSDYYWGWIRQPPGKGLEWIGTIYYSGNTFYNPSLKSRVTMSVDPSKNQFSLKLSSVTAADTAVYYCARDPRGSSTSCSYDYWGQGTLVTVSS

SEQ ID NO: 803 - protein, 127 aa, Artificial sequence
  VH
EVQLVESGGGLVKPGGSLRLSCAASGFTFSNAWMSWVRQAPGKGLEWVGRIKSKTDGGTTDYAAPVKGRFTISRDDSKNTLYLQMNSLKTEDTAVYYCTGQERITIFGVVIISSDYWGQGTLVTVSS

SEQ ID NO: 804 - protein, 118 aa, Artificial sequence
  VH
QVHLVQSGAEVKKPGSSVKVSCKASGGTFSTYAISWVRQAPGQGLEYMGGIIPSLRTANYAQRFQDRVSITADESTTTAYMELSSLRSDDTAVYYCARRLNDGANHSWGQGTRVTVSS

SEQ ID NO: 805 - protein, 121 aa, Artificial sequence
  VH
EVQLVQSGGGLVKPGESLRLSCAVSGLRFTDAWLNWVRQAPGKGLEWVGRIKSRGSGGTIELAAPVKGRFTISRDDSKSTLFLQMNSLRTEDTAIYYCSWDATVYYDMAVWGQGTTVTVSS

SEQ ID NO: 806 - protein, 121 aa, Artificial sequence
  VH
QVQLVESGGGVVQPGGSLRLSCAASGFSFSSYALHWVRQAPGKGLEWVALISYDGRNKYYADSVKGRFTISRDNSKKTLYLQMSTLTAEDTAVFYCARPSSGSYADPFDIWGQGTMVTVSS

SEQ ID NO: 807 - protein, 116 aa, Artificial sequence
  VH
QTVVESGGAVVQPGKSLTLSCEASGFSFSDFAMHWVRQSPGKGLEWVAVVSYDSRQQYYADSVQGRFRISRDNSQYTVTLRMDTLSFEDTGIYFCVASRSSSLDYWGQGTRVTVSS

SEQ ID NO: 808 - protein, 121 aa, Artificial sequence
  VH
QIQLVESGGGVVQPGRSLRLSCAASGFTFTTYGFHWVRQAPGKGLEWVAVIWYDGSNEAYADSVKGRITISRDNSRNTVYLQMNSLRAEDTAIYHCARSRGYGGLAGVDYWGQGTLVTVSS

SEQ ID NO: 809 - protein, 121 aa, Artificial sequence
  VH
DVQLVESGGGLVQPGGSLRLSCLATGFTFRSYSMNWVRQAPGKGLEWISYLSNDDRTRKYADSVNGRFTISRDNDGSSLFLQMDSLRDEDTAIYYCARAYFDDSSGGFDYWGQGALVIVSS

SEQ ID NO: 810 - protein, 120 aa, Artificial sequence
  VH
QVQLQESGPGLVKPAETLSLTCTVSGDSITSYYWSWIRQPAGKGLEWIGRIYSSGDTNYDPSLKSRVTMSVDTSKDQFSLRLSSVTAADTAIYYCAGSTYGDYVPHFYFWGQGTLVTVSS

SEQ ID NO: 811 - protein, 129 aa, Artificial sequence
  VH
QVQLQQWGAGLLKPSETLSLTCAVYGGSFSGSYWSWIRQSPGKGLEWIGEINPSGGSNYNPSLKSRVIISLDTSKNQFSLKLNSVTAADTAVYYCARGLSSFTTIVVVFVGASFYFDSWGQGTLATVAS

SEQ ID NO: 812 - protein, 129 aa, Artificial sequence
  VH
QVQLQQWGAGLLKPSETLSLTCAVSGGSFTDHYWTWIRQPPGKGLEWIGEINHSGRTNYSPSLKSRVTMSLDTSKNQFSLKLRSVTAADTGIYYCARGTTSTTMIVIVITAVSTWFDPWGQGTLVTVSS

SEQ ID NO: 813 - protein, 131 aa, Artificial sequence
  VH
QLQLQESGPGLVKPSETLSLTCTVSGGSISSSSYYWGWIRQPPGKGLEWIGSIYYSGSTYYNPSLKSRVTISVDTSKNQFSLKLSSVTAADTAVYYCARHPLKVDTIFGVVIIDPAPFDYWGQGTLVTVSS

SEQ ID NO: 814 - protein, 133 aa, Artificial sequence
  VH
QVTLKESGPVLVKPTETLTLTCTVSGFSLSNARMGVSWIRQPPGKALEWLAHIFSNDEKSYSTSLKSRLTISKDTSKSQVVLTMTNMDPVDTATYYCARIASYYYDSSGYYQTRPIGHAFDIWGQGTMVTVSS

SEQ ID NO: 815 - protein, 125 aa, Artificial sequence
  VH
QVQLVESGGGVVQPGRSLRLSCAASGFTFSSYGMHWVRQAPGKGLEWVAVISYDGSNKYYADSVKGRFTISRDNSKNTLYLQMNSLRAEDTAVYYCAKDRAQLLWFGQSRGMDVWGQGTTVTVSS

SEQ ID NO: 816 - protein, 115 aa, Artificial sequence
  VH
EVQLVESGGGLVKPGRSLRLSCTASGFTFGDYAMSWFRQAPGKGLEWVGFIRSKAYGGTTEYAASVKGRFTISRDDSKSIAYLQMNSLKTEDTAVYYCTSTSDWWGQGTLVTVSS

SEQ ID NO: 817 - protein, 129 aa, Artificial sequence
  VH
EVQLVESGGGLVQPGGSLKLSCAASGFTFSGSAMHWVRQASGKGLEWVGRIRSKANSYATAYAASVKGRFTISRDDSKNTAYLQMNSLKTEDTAVYYCTRLRSGLVGFDWLPLYGMDVWGQGTTVTVSS

SEQ ID NO: 818 - protein, 125 aa, Artificial sequence
  VH
EVQLVQSGAEVKKPGESLRISCKGSGYSFTSYWISWVRQMPGKGLEWMGRIDPSDSYTNYSPSFQGHVTISADKTISTAYLQWSSLKASDTAMYYCARRGVGILKDLPVYAMDVWGQGTTVTVSS

SEQ ID NO: 819 - protein, 128 aa, Artificial sequence
  VH
QVQLVQSGAEVKKPGASVKVSCKASGYTFTSYYMHWVRQAPGQGLEWMGIINPSGGSTSYAQKFQGRVTMTRDTSTSTVYMELSSLRSEDTAVYYCAREARQIFITMMTTKTSWFDPWGQGTLVTVSS

SEQ ID NO: 820 - protein, 127 aa, Artificial sequence
  VH
QVRLVQSGAEVKKPGSSVKVSCKASGGTFSSYAISWVRQAPGQGLEWMGRIIPIFHIANSAQKFQGRVTITADKSTSTAYMELSSLRSEDTAVYYCARVSSTAVVTGLDYYYGMDVWGQGTTVTVSS

SEQ ID NO: 821 - protein, 131 aa, Artificial sequence
  VH
EVQLVESGGGLVKPGGSLRLSCAASGFTFSNAWMSWVRQAPGKGLEWVGRIKSKTDGGTTDYAAPVKGRFTISRDDSKNTLYLQMNSLKTEDTAVYYCTTISVGLLWFGLAVRDHYYFDYWGQGTLVTVSS

SEQ ID NO: 822 - protein, 125 aa, Artificial sequence
  VH
EVQLVESGGGSVRSGGSLRLSCAASGFTFRSYWMHWVRQAPGKGLVWVSRIFSDWSTTTYADSVRGRFTISRDNAKNTLYLEMNRLKVEDTAVYYCARSYYDSSTGYYPDALDLWGQGTTVTVSS

SEQ ID NO: 823 - protein, 125 aa, Artificial sequence
  VH
EVQLLESGGGLVQPGGSLRLSCAASGFTFSTYAMSWVRQAPGKGLEWVAAISGSGGSTYYADSVKGRFTISRDNSKNTLYLQMNSLRAEDTAVYYCAKSGSVWGSYHKTYYFDYWGQGTLVTVSS

SEQ ID NO: 824 - protein, 128 aa, Artificial sequence
  VH
QVQLVESGGGVVQPGRSLRLSCAASGFTFSSYGMHWVRQAPGKGLEWVAVISYDGSNKNYADSVKGRFTISRENSKNTLYLQMNSLRAEDTAVYYCAKEILKGYSSGWKYYYYGMDVWGQGTTVTVSS

SEQ ID NO: 825 - protein, 128 aa, Artificial sequence
  VH
EVQLVESGGGLIQPGGSLRLSCAASGFTVSSNYMNWVRQAPGKGLEWVSVIYSGSSTYYADSVKGRFTISRDNSKNTLYLQMNSLRAEDTAVYYCARATTTMVRGVIYHYYYYGMDVWGQGTTVTVSS

SEQ ID NO: 826 - protein, 125 aa, Artificial sequence
  VH
QVQLQESGPGLVKPSQTLSLTCTVSGGPISSGGYYWSWIRQHPGKGLEWLGCIYYSGSTYYNPSLKSRVSISVDTSKSQFSLKLSSVTAADTAVYYCARERLGRMVRGVNWFDPWGQGILVTVSS

SEQ ID NO: 827 - protein, 123 aa, Artificial sequence
  VH
QLQLQESGPGLVKPSETLSLTCTVSGGSISSSYYYWGWIRQPPGKGLEWIGSIYYSGSTYYNPSLKSRVTISVDTSKNQFSLKLSSVTAADTAVYYCASWTMVRGVIRWFDPWGQGTLVTVSS

SEQ ID NO: 828 - protein, 131 aa, Artificial sequence
  VH
QLQLQESGPGLVKPSETLSLTCTVSGGSISSSSYYWGWIRQPPGKGLEWIGSIYYSGSTYYNPSLKSRVTISVDTSKNQFSLKLSSVTAADTAVYYCARQFHYVGIVVVVAPHYYYGMDVWGQGTTVTVSS

SEQ ID NO: 829 - protein, 120 aa, Artificial sequence
  VH
EVQLVESGGGLVKPGGSLRLSCAASGFTFSSYSMNWVRQAPGKGLEWVSSISSSSSYIYYADSVKGRFTISRDNAKNSLYLQMNSLRAEDTAVYYCASPRGYSYGPFDYWGQGTLVTVSS

SEQ ID NO: 830 - protein, 128 aa, Artificial sequence
  VH
QVQLVQSGAEVKKPGASVKVSCKASGYTFTSYGISWVRQAPGQGLEWMGWISAYNGNTNYAQKLQGRVTMTTDTSTSTAYMELRSLRSDDTAVYYCARVLYYDILTGYWWYYYGMDVWGQGTTVTVSS

SEQ ID NO: 831 - protein, 126 aa, Artificial sequence
  VH
EVQLVESGGGLVQPGGSLRLSCAASGFTFSSYWMHWVRQAPGKGLVWVSRINSDGSSTSYADSVKGRFTISRDNAKNTLYLQMNSLRAEDTAVYYCARGAPITIFGVVISTWFDPWGQGTLVTVSS

SEQ ID NO: 832 - protein, 120 aa, Artificial sequence
  VH
QLQLQESGSGLVKPSQTLSLTCAVSGGSISSGGYSWSWIRQPPGKGLEWIGYIYHSGSTYYNPSLKSRVTISVDRSKNQFSLKLSSVTAADTAVYYCARAHTDSLELGIWGQGTMVTVSS

SEQ ID NO: 833 - protein, 129 aa, Artificial sequence
  VH
EVQLLQSGGEVRRPGESLKISCKASGYSFPAHWIGWVRQMPGRGLEWMGSIFPSDSDTEYSPSFEGQVKISADKSITTAYLQWSSLKASDTAFYYCVRKYTYDTSGFFLTSTRSAFDVWGQGTMVTVSS

SEQ ID NO: 834 - protein, 129 aa, Artificial sequence
  VH
EVQLEQSGAEEKKPGESLKISCKGSGYSFPAFYIAWMRQMPGKGLEWMGSIFPGDSETEYNPSFQGQVTISADKSITTAYLQWDNLKASDTALYYCARKHVYDTSGFFLSSSRNAFDVWGQGTKVTVFS

SEQ ID NO: 835 - protein, 129 aa, Artificial sequence
  VH
EVQLVQSGAEQRKPGESLRISCKGSGYSFPAHWIAWVRQMPGRGLEWMGSIFPGDSDTEYNPSFQGHVNISADRSINTAYLQWSSLKASDSAIYYCARKYSFDISGFFLSSSRYALDVWAQGTTVTVSS

SEQ ID NO: 836 - protein, 131 aa, Artificial sequence
  VH
DMQLVESGGGLVQPGGSLKLSCAASGFTFSASAIHWVRQASGKGLEWVGHIRTRTNRYATAFSESVNGRFTISRDDSKSTAYLQMNSLKAEDTAVYYCARDEGVTFHDHWANEIRYGMDVWGRGTTVTVSS

SEQ ID NO: 837 - protein, 124 aa, Artificial sequence
  VH
QVQLQESGPGLVKPSQTLSLTCTVSGGSISSGGYYWSWIRQHPGKGLEWIGYIYYSGSTYYNPSLKSRVTISVDTSKNQFSLKLSSVTAADTAVYYCARARTTMIVVVSQFDYWGQGTLVTVSS

SEQ ID NO: 838 - protein, 126 aa, Artificial sequence
  VH
EVQLVESGGGLVQPGGSLRLSCAASGFTFSSYWMHWVRQAPGKGLVWVSRINSDGSSTSYADSVKGRFTISRDNAKNTLYLQMNSLRAEDTAVYYCARDRGGWLLGSYYYYGMDVWGQGTTVTVSS

SEQ ID NO: 839 - protein, 121 aa, Artificial sequence
  VH
QVQLVQSGAEVKKPGASVKVSCKASGYTFTSYGISWVRQAPGQGLEWMGWISAYNGNTNYAQKLQGRVTMTTDTSTSTAYMELRSLRSDDTAVYYCARGQISHYGFGESHWGQGTLVTVSS

SEQ ID NO: 840 - protein, 128 aa, Artificial sequence
  VH
QITLKESGPTLVKPTQTLTLTCTFSGFSLSTSGVSVGWIRQPPGKALEWLALIYWDDDKRYSPSLKSRLTITKDTSKKQVVLTLTNMDPVDTASYYCAHSGIAVVGNQLFHYYAMDVWGQGTTVTVSS

SEQ ID NO: 841 - protein, 128 aa, Artificial sequence
  VH
QVQLVESGGGVVQPGRSLRLSCAASGFTFSSYGMHWVRQAPGKGLEWVAVISYDGSNKYYADSVKGRFTISRDNSKNTLYLQMNSLRAEDTAVYYCAKERSSGSQWGWTYYYYGMDVWGQGTTVTVSS

SEQ ID NO: 842 - protein, 130 aa, Artificial sequence
  VH
QVQLVESGGGVVQPGRSLRLSCAASGFTFSSYAMHWVRQAPGKGLEWVAVISYDGSNKYYADSVKGRFTISRDNSKNTLYLQMNSLRAEDTAVYYCARDPYGGNRRFHGWVYYYYGMDVWGQGTTVTVSS

SEQ ID NO: 843 - protein, 121 aa, Artificial sequence
  VH
EVQLVESGGGLVQPGGSLRLSCAASGFTFSSYEMNWVRQAPGKGLEWVSYISSSGSTIYYADSVKGRFTISRDNAKNSLYLQMNSLRAEDTAVYYCARESTPDVRGVMNYWGQGTLVTVSS

SEQ ID NO: 844 - protein, 120 aa, Artificial sequence
  VH
EVQLLESGGGLVLPGGSLRLSCAASGFTFSIYAMSWVRQAPGKGLEWVSAISGSGGSTYYADSVKGRFTISRDNSKNTLYLQMNSLRAEDTAVYYCAKDAVASAGSPDYWGQGTLVTVSS

SEQ ID NO: 845 - protein, 130 aa, Artificial sequence
  VH
QVQLVESGVGVVQPGKSLRLSCAASGFTFTSYGMHWVRQAPGKGLEWVAVISFDGSNIYYADSVKGRFTISRDNFKNTLYLQMNSLRAEDTAVYYCARDKLLWFGEPVVGYYYYYYMDVWGKGTTVTVSS

SEQ ID NO: 846 - protein, 122 aa, Artificial sequence
  VH
QVQLVESGGGVVQPGRSLRLSCAASGFTFSSYGMHWVRQAPGKGLEWVAVISYDGSNKYYADSVKGRFTISRDNSKNTLYLQMNSLRAEDTAVYYCARDGGGDYAQIYFDYWGQGTLVTVSS

SEQ ID NO: 847 - protein, 124 aa, Artificial sequence
  VH
QVQLVESGGGVVHPGRSLRLSCAASGFAFNKYGIHWVRQAPGKGLEWVALIWNDGNKQYYGDSVKGRFTVSRDNSKNTVSLQMDTLRDEDTAVYYCARDRLMTTYNYYSSMDVWGRGATVIVSS

SEQ ID NO: 848 - protein, 126 aa, Artificial sequence
  VH
QVQLVESGGGVVQPGRSLRLSCAASGFTFSSYGMHWVRQAPGKGLEWVAVIWYDGSNKYYADSVKGRFTISRDNSKNTLYLQMNSLRAEDTAVYYCAREPGDCSGGSCYYYGMDVWGQGTTVTVSS

SEQ ID NO: 849 - protein, 123 aa, Artificial sequence
  VH
QLQLQESGPGLVKPSETLSLTCTVSGGSISSSSYYWGWIRQPPGKGLEWIGSIFYSGSTYYNPSLKSRVTISVDTSKNQFSLKLSSVTAADTAVYYCARATRGYSYDDAFDIWGQGTMVTVSS

SEQ ID NO: 850 - protein, 126 aa, Artificial sequence
  VH
QVQLQESGPGLVKPSGTLSLTCSVSGGAITTSSYFWGWIRQPPGRGLEWIGSISYSGDTFYNPSLNDRVTISVDSSKNQFFLKLRSVTAADSAVYYCASPSYTDLLTGYYVPVDYWGQGILVIVSS

SEQ ID NO: 851 - protein, 129 aa, Artificial sequence
  VH
QVHLVESGGGVVQPGKSLTLSCAASGFTFSAYGMHWVRQTPGKGLEWVALISFDGSNKYYRDSVKDRFTIARDNSKNTLSLQMNSLRPEDTAIYYCAKDPRVNELLWFGSLTQFYFDDWGQGTLVTVSS

SEQ ID NO: 852 - protein, 124 aa, Artificial sequence
  VH
QVQLVESGGGVVQPGRSLTLSCAASGFTFNNYGMHWVRQAPGKGLEWLALISYEGSIRYYGDSVKGRFTISRDSSKNTVYLQMISLRAEDTAVYYCAKSGGPFHLSLYYYMDVWGKGTTVTVSS

SEQ ID NO: 853 - protein, 117 aa, Artificial sequence
  VH
QVQLQESGPGLVKPSETLSLTCTVSGGSINSYYWSWIRQTAGQGLEWIGRIYSGGSTNYNPSLKSRVTMSVDTSQNQFSLNLNSVTAADTAVYYCARAFYGHAFDFWGLGVLVIVSS

SEQ ID NO: 854 - protein, 117 aa, Artificial sequence
  VH
QVQLVESGGGVVHPGRSLRLSCAASGFTFSRFGMHWVRQAPGKGLEWVALISYEGSTEQYSDSVKGRFAISRDNSKNTLYLQMNSLRPEDTAVYYCAKGLTIPFDKWGHGTLVTVSS

SEQ ID NO: 855 - protein, 117 aa, Artificial sequence
  VH
QVQLVESGGGVVHPGRSLRLSCAASGFTFSRFGMHWVRQAPGKGLEWVALISYEGSTEQYSDSVKGRFAISRDNSKNTLYLQMNSLRAEDTAVYYCAKGLTIPFDKWGHGTLVTVSS

SEQ ID NO: 856 - protein, 126 aa, Artificial sequence
  VH
EVQLVESGGGLVQPGGSLRLSCAASGFTFSSFWMTWFRQTPGKGLEWVANIKEDGSEKQYVDSVKGRFNISRDNAHNSLYLEMNSLRSEDAAVYYCARRGKYCSGGRCYSWWFDPWGQGTQVTVSS

SEQ ID NO: 857 - protein, 118 aa, Artificial sequence
  VH
QVQLVQSGGEMRKPGSSVKVSCKASGGTFSSYTISWVRQAPGQGLEWMGRIIPMLNKTYYAQKFQGRVTFAADESTSTVYMELSSLRSEDTAMYYCARVASLIGDDYWGQGSLVTVSS

SEQ ID NO: 858 - protein, 118 aa, Artificial sequence
  VH
QVQLVQSGGEMRKPGSSVKVSCKASGGSFSSYTISWVRQAPGHGLEWMGRIIPMLNKTYYAQKFQGRVTVAADESTSTVYMELSSLSSEDTAIYYCARVASLIGDDYWGQGSLVTVSS

SEQ ID NO: 859 - protein, 121 aa, Artificial sequence
  VH
QITLKESGPTLVKPTQTLTLTCTFSEFSLDSRGVGVGWIRQPPGRALEWLALIYWNDNKRYNPSLRSRLTITKDTSKNQVVLTMSNMDPVDTATYYCAHKPSGWSLRFDSWGQGTLVTVSS

SEQ ID NO: 860 - protein, 117 aa, Artificial sequence
  VH
QVQLQEAGPGLVKPSETLSLTCSVFGGSISSYYWSWIRQPPGKGLEWIGYIYYRGSTNYNPSLKSRVTMSVDTSKNQFSLNLTSVTAADTAVYFCARESLFNWFDSWGHGTLVTVSS

SEQ ID NO: 861 - protein, 117 aa, Artificial sequence
  VH
QVQLVESGGGVVQPGRSLRLSCAASGFTFSRYGMHWVRQAPGKGLEWVALISYEGSTEQYSDSVKGRFAISRDNSKNTLYLQMNSLRHEDTAVYYCAKGLTIPFDNWGQGTLVTVSS

SEQ ID NO: 862 - protein, 118 aa, Artificial sequence
  VH
EVQLVESGGGLVQTGGSLRLSCAASGFPFSGYALNWVRQAPGKGLEWVSYISSSSSTVYYADSVKGRFTISRDNAKNSLYLQMNSLRDEDTAVYYCARVDYDSSRNYWGQGTLVTVSS

SEQ ID NO: 863 - protein, 125 aa, Artificial sequence
  VH
EVQLVESGGGLVQPGGSLRLSCAASGFTFINYDMTWVRQAPGKGLEWISYISSSSSTTHYSDSVKGRFTISRDNARNSLYLEMNSLRAEDTAVYYCARVERWLVLGYYYYGMDVWGQGTTVTVSS

SEQ ID NO: 864 - protein, 112 aa, Artificial sequence
  VH
EVQLVESGGGLVQPGESLRLSCVASGFAFDKFWMAWLRQAPGKGLEWVALLNKDESEKYYVDSVKGRFTISRDNAIDSVFLQMNSLRTEDTAVYYCGSIDYWGQGALVTVSS

SEQ ID NO: 865 - protein, 124 aa, Artificial sequence
  VH
QVQLQESGPGLVKPSQTLSVTCTVSGGSINRDGHYWIWIRQHPEKGLEWLGYIYSGRNTFYNPSLRSRLSISADTSKSQFSLNLHSVTAADTAVYYCAKMYSDYDDNYYGLDVWGRGTTVTVSS

SEQ ID NO: 866 - protein, 126 aa, Artificial sequence
  VH
QVQLQESGPGLVKPSETLSLTCTVSGGSISSYYWSWIRQPPGKGLEWIGYIYYSGSTNYNPSLKSRVTISVDTSKNQFSLKLSSVTAADTAVYYCARDRYCSSTSCGGYYYYMDVWGKGTTVTVSS

SEQ ID NO: 867 - protein, 125 aa, Artificial sequence
  VH
QVQLQESGPGLVKPSETLSLTCTVSGGSVSSGSYFWSWIRQPPGKGLEWIGYIYYSGSTNYNPSLKSRVTISVDTSKNQFSLKLRSVTAADTAVYYCARAPNDFWSGYPYYFDYWGQGTLVTVSS

SEQ ID NO: 868 - protein, 122 aa, Artificial sequence
  VH
QVQLVQSGAEVKKPGASVKVSCKASGYTFTSYGISWVRQAPGQGLEWMGWISAYNGNTNYAQKLQGRVTMTTDTSTSTAYMELRSLRSDDTAVYYCTRDGSTAAIFGNIDYWGQGTLVTVSS

SEQ ID NO: 869 - protein, 123 aa, Artificial sequence
  VH
QVQLVQSGAEVKKPGASVKVSCKASGYTFTGYYMHWVRQAPGQGLEWMGWINPNSGGTNYAQKFQGRVTMTRDTSISTAYMELSRLRSDDTAVYYCARGVVRNDYGDPGFDYWGQGTLVTVSS

SEQ ID NO: 870 - protein, 127 aa, Artificial sequence
  VH
QVQLVQSGAEVKKPGASVKVSCKVSGYTLTELSMHWVRQAPGKGLEWMGGFDPEDGETIYAQKFQGRVTMTEDTSTDTAYMELSSLRSEDTAVYYCATAPAYCSGGSCPENNWFDPWGQGTLVTVSS

SEQ ID NO: 871 - protein, 127 aa, Artificial sequence
  VH
QVLLVQSGAEVKKPGASVKVSCKASGYRFTSYGIHWVRQAPGQSLEWMGCINTDNEKTEYSQKFQGRVTITRDTSASTAYMELSTLRFEDTAVYYCAILWFGEFYFYDLFYNAVDVWGQGTTVTVSS

SEQ ID NO: 872 - protein, 127 aa, Artificial sequence
  VH
QVLLVQSEAEVKKPGASVKVSCKASGYRFTSYGIHWVRQAPGQGLEWMGSINTDNGKTEYSQKFQGRVTITRDTSAGTAYMELSTLRSEDTAVYYCAILWFGEFYFYDLFYNAVDVWGQGTTVTVSS

SEQ ID NO: 873 - protein, 127 aa, Artificial sequence
  VH
QVQLVQSGAEVKKPGASVKVSCKASGYTFTSYAMHWVRQAPGQRLEWMGWINAGNGNTRYSQKFQGRVTITRDTSASTAYMELSSLRSEDTAVYYCASRREQWLGDLGYYYYGMDVWGQGTTVTVSS

SEQ ID NO: 874 - protein, 117 aa, Artificial sequence
  VH
QVQLVQSGAEVKKPGASVKVSCKASGYTFTSYYMHWVRQAPEQGLEWMGIINPSGGSTSYAQKFQGRVTMTRDTSTSTVYMELSSLRSEDTAVYYCARGGAHSEDYWGQGTLVTVSS

SEQ ID NO: 875 - protein, 127 aa, Artificial sequence
  VH
QVQMVQSGAEVKKPGASVKVSCKASGYTFTNYYVHWVRQAPGQGLEWMGRINPSDGSTSYTQKFQGRVTMTRDTSTSTVYMQLSSLRSEDTALYYCARHQDPLDIVATVDWGGLDYWGQATLVTVSS

SEQ ID NO: 876 - protein, 118 aa, Artificial sequence
  VH
QVQLVQSGGELRKPGSSVKVSCKASGGTFSSYTISWVRQAPGQGLEWMGRIIPMLNKTYYAQKFQGRVTFAADESTNTVYMELSSLRSEDTAMYYCARVASLIGDDYWGQGSLVTVSS

SEQ ID NO: 877 - protein, 121 aa, Artificial sequence
  VH
QVQLVQSGAEVKKPGSAVKVSCKASGGTFNSYAFNWVRQAPGQGLEWMGGIIPIFGPPNYAQNFQGRVTITADESTSTAYMELSSLTSEDTAVYYCATTGTDNYYYYMDVWGKGTTVTVSS

SEQ ID NO: 878 - protein, 122 aa, Artificial sequence
  VH
QVQLVQSGAEVKKPGASVKVSCKASGYTFTSSDINWVRQATGQGLEWMGWMNPNTGTTGYAQKFQDRVTMTRDTSINTAYMELSSLRSEDTAVYYCARKNCSGGICYFHDYWGQGTRVTVSS

SEQ ID NO: 879 - protein, 121 aa, Artificial sequence
  VH
QITLKESGPTLVKPTQTLTLTCTFSEFSLDARGVGVGWIRQPPGRALEWLALIYWNDYKRYSPSLQSRLTITKDTSKNQVVLTMTNMDPVDTATYYCAHKPSGWSLRFDSWGQGTLVTVSS

SEQ ID NO: 880 - protein, 121 aa, Artificial sequence
  VH
EVQLLESGGGLVQPGGSLRLSCAASGFTFISYATSWVRQAPGKGLEWVSAISGSGGSTYYADSVKGRFTISRDNSKNTLYLQMNSLRAEDTAVYYCAKGQTIQLWLFGALWGQGTLVTVSS

SEQ ID NO: 881 - protein, 121 aa, Artificial sequence
  VH
EVQLLESGGGLVQPGGSLRLSCAASGFTFSSYAMSWVRQAPGKGLEWVSAISGSGGTTYYADSVKGRFTISRDNSKNTLYLQMDSLRGDDTAVYSCALTVSSWYPGIFENWGQGTLVTVSS

SEQ ID NO: 882 - protein, 121 aa, Artificial sequence
  VH
QVQLVESGGGVVQPGRSLRLSCAASGFTFSSYGMHWVRQAPGKGLEWVAVISYDGSNKYYADSVKGRFTISRDNSKNTLYLQMNSLRAEDTAVYYCAKAFSGSYWDAFDIWGQGTMVTVSS

SEQ ID NO: 883 - protein, 122 aa, Artificial sequence
  VH
QVQLVESGGGVVQPGRSLRLSCAASGFTFSSHGMHWVRQAPGKGLEWVAVISYDGINKYYADSVKGRFTISRDNSKNTLFLQLNSLRAEDTAVYYCAKAASGARGYYGMDVWGQGTTVTVSS

SEQ ID NO: 884 - protein, 121 aa, Artificial sequence
  VH
QVQLVESGGGVVQPGRSLRLSCAASGFTFSSYAMHWVRQAPGKGLEWVAVISYDGSNKYYADSVKGRFTISRDNSKNTLYLQMNSLRAEDTAVYYCARSSSGHYVSDLGYWGQGTLVTVSS

SEQ ID NO: 885 - protein, 119 aa, Artificial sequence
  VH
QVQLVESGGGVVQPGRSLRLSCAASGFTFSSYAMHWVRQAPGKGLEWVAVISYDGSNKYYADSVKGRFTISRDNSKNTLYLQMNSLRAEDTAVYYCARALNGYRYNDYWGQGTLVTVSS

SEQ ID NO: 886 - protein, 121 aa, Artificial sequence
  VH
QVQLVESGGGVVQPGRSLRLSCAASGFTFSTYGMHWVRQAPGKGLEWVAVMWFDGVDKYYADSVKGRFTISRDNSKNTLYLQMNSLRDEDTAVYYCAREEGGGSSTHFDCWGQGTLVTVSS

SEQ ID NO: 887 - protein, 121 aa, Artificial sequence
  VH
QVQLVESGGGVVQPGRSLRLSCAASGFTFSTFAMHWVRQAPGKGLEWVAIISYDEINKYYADSVKGRFTISRDNSKNMLYLQMNSLRAEDTAVYYCARTREGSYYYGMDVWGQGTTVTVSS

SEQ ID NO: 888 - protein, 127 aa, Artificial sequence
  VH
EVKLVESGGHLVQPGRSLRLSCTASGFIFGDYAMGWVRQAPGKGLEWVSFIRGRLVGATVEYAASVKGRFTMSRDDSERVAYLQMNSLKIEDTGVYYCVRGGLQFVVAVGPYGVDVWGQGTTVTVSS

SEQ ID NO: 889 - protein, 127 aa, Artificial sequence
  VH
EVKLVESGGHLVQPGGSLRLSCTASGFIFGDYAMGWVRQAPGKGLEWVSFIRGRLVGATVEYAASVKGRFTMSRDDSERVAYLQMSSLKIDDTGVYYCVRGGLQFVVAVGPYGVDVWGQGTTVTVSS

SEQ ID NO: 890 - protein, 118 aa, Artificial sequence
  VH
EVQLVESGGGLVQPGGSLRLSCAASGFTFSSYWMSWVRQAPGKGLEWVANIKQDGSEKYYVDSVKGRFTISRDNAKNSLYLQMNSLRVEDTAVYYCARDIGGGAPDYWGQGTLVTVSS

SEQ ID NO: 891 - protein, 120 aa, Artificial sequence
  VH
QVLLQESGPGLVRPSQTLSLTCSVSGASISSGDYYWTWVRQTPGKGLEWLGFIYYSGSTYYNPSLQRRVLISMDTAMNQFSLRLTSVTAADTAVYYCAIKPSIPGYFDPWGQGTLVTVSS

SEQ ID NO: 892 - protein, 119 aa, Artificial sequence
  VH
QVQLQQWGAGLLKPSETLSLTCALNGGVLSDYYWSWIRQPPGQGLEWIGAIHRSGSTSYTPSLKSRVTMSVDTSKNQFSLRLSSVTAADTAVYYCARVGGWQRSPRPNWGQGTRVTVSS

SEQ ID NO: 893 - protein, 119 aa, Artificial sequence
  VH
QVQLQQWGAGLLKPSETLSLTCALNGGVLSDYYWSWIRQPPGQGLEWIGAIHRSGSTSYTPSLKGRVTMSVDTSKNQFSLRLSSVTAADTAVYYCARVGGWQRSPRPNWGQGTRVTVSS

SEQ ID NO: 894 - protein, 121 aa, Artificial sequence
  VH
QVQLQQWGAGLLKPSETLSLTCAVYGGSFSDYYWNWIRRPPGKGLEWIGEITHSGSTNYNPSLKSRVTISVDTSKNQFSLKLSSVTAADTAVYYCARGQGYGRVLLWFGEWGQGTLVTVSS

SEQ ID NO: 895 - protein, 121 aa, Artificial sequence; identical to SEQ ID NO: 894
  VH

SEQ ID NO: 896 - protein, 118 aa, Artificial sequence
  VH
QVQLQESGPGLVKPSGTLSLTCDVSGDSISSNNWWTWVRQPPGKGLEWIGDIYHSGTTNYNPSLKSRLTMSVDKSKNHFSLKLTSVTAADTAVYYCARPSSGSRFDYWGQGTLVTVSS

SEQ ID NO: 897 - protein, 112 aa, Artificial sequence
  VH
QVQLQESGPGLVKPSETLSLTCTVSGGSISSYYWSWIRQPAGKGLEWIGHIYTSGSTNYNPSLKSRVTMSVDTSKNQFSLKLSSVTAADTAVYYCARGFDYWGQGTLVTVSS

SEQ ID NO: 898 - protein, 117 aa, Artificial sequence
  VH
QVQLQESGPGLVKPSETLSLTCTVSGDSISSYYWSWIRQSPGKGLEWIGYIYHSGSADYNPSLKSRVSMSLDASKNQFSLKMSSVTAADTALYYCAKARGVVLFDYWGQGTLVTVSS

SEQ ID NO: 899 - protein, 122 aa, Artificial sequence
  VH
QVQLRESGPGLVKPSETLSLTCTVSGGSISGYYWSWIRQPPGKGLEWIGYLHYSGRSNSSPSLNSRVSISVDTSQNRFSLKVTSLTAADTAVYYCARHSYGSGTYLDPFDYWGQGTLVTVSS

SEQ ID NO: 900 - protein, 129 aa, Artificial sequence
  VH
QVQLQESGPGLVKPSQTLSLTCTVSGGSISSGSYYWSWIRQPAGKGLEWIGRIYTSGSTNYNPSLKSRVTISVDTSKNQFSLKLSSVTAADTAVYYCARQPHLAYYYDSSGYNDAFDIWGQGTMVTVSS

SEQ ID NO: 901 - protein, 121 aa, Artificial sequence
  VH
QVQLQESGPGLVKPSQTLSLICTVSDDSISSGSYYWSWIRQPAGKGLEWIGRIYAGESTNYNPSLKSRVIISVDTSKKQFSLRLSSVTAADTAVYYCARGAVVTPFGLDSWGQGTLVTVSS

SEQ ID NO: 902 - protein, 121 aa, Artificial sequence
  VH
EVQLVQSGAEVKKPGESLKISCKGSGYSFTSYWIGWVRQMPGKGLEWMGIIYPGDSDTRYSPSFQGQVTISADKSISTAYLQWSSLKASDTAMYYCASEDYYDSSGYYWYWGQGTLVTVSS

SEQ ID NO: 903 - protein, 125 aa, Artificial sequence
  VH
EVQLVQSGAEVKKPGESLKISCKGSGYSFTSYWIGWVRQMPGKGLEWMGIIYPGDSDTRYSPSFQGQVTISADKSISTAYLQWGSLKASDTAMYYCARLSAIAVVGYYYYAMDVWGQGTTVTVSS

SEQ ID NO: 904 - protein, 125 aa, Artificial sequence
  VH
QVQLVQSGSELKKPGASVKVSCKASGYTFTSYAMNWVRQAPGQGLEWMGWINTNTGNPTYAQGFTGRFVFSLDTSVSTAYLQISSLKAEDTAVYYCARDFIAASPFYYYYYMDVWGKGTTVTVSS

SEQ ID NO: 905 - protein, 126 aa, Artificial sequence
  VH
EVQLVQSGAEVKKPGESLKIFCKGSGYTFSFYWIGWVRQTPGKGLEWMGIIYPGDFDTRYSPSFQGQVTISADKSINTAYLQWSSLKASDTAMYYCATSPGGYGVRRTVLEDFRHWGQGTLVTVAS

SEQ ID NO: 906 - protein, 122 aa, Artificial sequence
  VH
QLQLQESGPGLVKPSETLSLTCTVSGGAFSSGRHYWGWIRQPPGKGLEWIGSIYSGVITHYNAPLKSRVTIAVDTSKNQFSLKLSSVTAADTAVYYCWTMEYDDYSFVYDYWGQGTLVTVSS

SEQ ID NO: 907 - protein, 122 aa, Artificial sequence
  VH
QVHLQQWGAGLLKPSQTLSLTCAVYGGSFSSYYWSWIRQTPGKGLEWIGEVTHSGSTNYKPSLKSRVTMSVDTSRNQFSLNLTSVTAADTAVYYCARGGKQQLVRNYYLDSWGQGTLVTVSS

SEQ ID NO: 908 - protein, 121 aa, Artificial sequence
  VH
QVQLVQSGAEVKKPGASVKVSCKVSGYTLTELSMDWVRQAPGKGLEWMGGFDPEDGETIDAQKFQGRVTMTEDTSTDTAYMELSSLRSEDTAVYYCATGFGGVIVRGFDYWGQGTLVTVSS

SEQ ID NO: 909 - protein, 120 aa, Artificial sequence
  VH
QVQLVESGGGLVKPGGSLRLSCAASGFTFSDYYMSWIRQAPGKGLEWVSYISSSGSTIYYADSVKGRFTISRDNAKNSLYLQMNSLRAEDTAVYYCARVYGDYSYYMDVWGKGTTVTVSS

SEQ ID NO: 910 - protein, 118 aa, Artificial sequence
  VH
EVQLVESGGGLIQPGGSLRLSCAASGITVSSNYMSWVRQAPGKGLEWVSVIYSGGSTDYADSVKGRFTISRDKSKNTLYLQMNSLRAEDTAVYYCARDLGEAGGMDVWGQGTTVTVSS

SEQ ID NO: 911 - protein, 123 aa, Artificial sequence
  VH
EVQLVESGGGLVQPGGSLRLSCAASGFTFSRFWMTWVRQAPGKGLEWVANIKEDGSVMFYVDSVKGRFSISRDNSKNSLYLEMNSLRAEDTAVYFCVREIESGVDFWSGHYYWGQGTLVTVSS

SEQ ID NO: 912 - protein, 124 aa, Artificial sequence
  VH
EVQLVESGGGLVQPGGSQRLSCVASGFTFSNYWMSWVRQAPGKGLHWVANIKSDGSETYYVDSLRGRFTISRDNAKNSLYLQLTSLTVEDTAVYYCARDSAYYDTIGYYSGDYWGRGTLVTVSS

SEQ ID NO: 913 - protein, 118 aa, Artificial sequence
  VH
QVQLVESGGGAVQPGRSLRLSCEASAFSFHLHGMHWVRQAPGKGLEWVALIWFDGSKKFYADAVKGRFTISRDNSKNTLYLQMNSLRVEDTAIYYCGRSFRGSCFDYLGQGTLVTVSS

SEQ ID NO: 914 - protein, 119 aa, Artificial sequence
  VH
EVQLLESGGGLVQPGGSLRLSCAASGFTFSSYAMSWVRQAPGKGLEWVSAISSSGGGTYYADSVKGRFTISRDNSKNTLYVQMNSLRAEDTAVYYCALGTGSYYGVNYWGQGTLVTVSS

SEQ ID NO: 915 - protein, 128 aa, Artificial sequence
  VH
EVQLVESGGGLVQPGRSLRLSCAAFGFIFDDYGMHWVRQVPGKGLEWVSGITWNSGSIGYADSVKGRFTISRDNAKNSLYLQMNSLRAEDTALYFCAKDMGGRYSSGLYYYYYGMDVWGQGTTVTVSS

SEQ ID NO: 916 - protein, 116 aa, Artificial sequence
  VH
EVQLVESGGGLVQPGGSLRLSCAASGFTVSSNYMSWVRQAPGKGLEWVSVIYSGGSTYYADSVKGRFTISRHNSKNTLYLQMNSLRAEDTAVYYCARELRGYFDYWGQGTLVTVSS

SEQ ID NO: 917 - protein, 126 aa, Artificial sequence
  VH
QMRLQESGPGLVKPSETLSLTCTVSGGSIGSSSYFWGWIRQPPGKGLEWIGNIYYGGSTYYKPSLKSRVTISLDTSKNQLTLRLSSVTAADTAVYYCARDPNDFWSGFPRGAFDIWGQGTMVTVSS

SEQ ID NO: 918 - protein, 121 aa, Artificial sequence
  VH
QLQLQESGPGLVKPSETLSLTCTVSGGSISSSSYYWGWIRQPPGKGLEWIGSIYYSGSTYYNPSLKSRVTISVDTSKNQFSLKLSSVTAADTAVYYCASHARYEEETFDYWGQGTLVTVSS

SEQ ID NO: 919 - protein, 123 aa, Artificial sequence
  VH
EVQLVESGGGLAQPGGSLRLSCAASGFTFSSYDMHWVRQAAGKGLEWVSTIGTAGDTYYPGSVKGRFTISRENDKNSLYLQMNSLRAGDTAVYYCVRDSYTSAWTPAGYFDLWGRGTLVTVSS

SEQ ID NO: 920 - protein, 117 aa, Artificial sequence
  VH
QVQLVESGGGVVQPGRSLRLSCAASGFTFSRSAMHWVRQGPGKGLEWVAMMSYDGSDIQYADSVKGRFTISRGNSKNTLFLQMNSLRLADTAMYYCAKDHYGSIDYWGQGTLVTVSS

SEQ ID NO: 921 - protein, 119 aa, Artificial sequence
  VH
QVQLVESGGGVVQPGRSLRLSCVASGFTFSSQSMHWVRQAPGKGLEWVSIISYDGNNKQYADSVKGRFTISRDNSKSTLFLQINSLRPQDTAVYYCARPYTSRWFWSNWGQGTLVTVSS

SEQ ID NO: 922 - protein, 124 aa, Artificial sequence
  VH
EVQLVESGGGLVQPGRSLRLSCAASGFTFEEYSIHWVRQAPGKGLEWVSGVSWNSGTIAYADSVRGRFTISRDNAKNSLYLQMSRLRADDTALYYCALLPPNAYDYGDGLLDHWGQGTLVTVSS

SEQ ID NO: 923 - protein, 123 aa, Artificial sequence
  VH
EVQVVQSGAEVKKPGESLKISCKGSGYTFGRYWIAWVRQMPGKGLEWMGIINPADSDTRYSPTFQGQVTISVDQAISTAYLQWSSLKASDTAMYHCARHRAAGGNYYYGMDVWGQGTTVTVSS

SEQ ID NO: 924 - protein, 121 aa, Artificial sequence
  VH
QVQLVQSGAEVKKPGASVKVSCKASGYTFSTYYMHWVRQAPGQGLEWMGIINPSGDSTRYAQKFQGRVTMTRDTSTSTVYMEVSSLRFEDTAVYYCARERVGPAAGYMDVWGKGTTVTVSS

SEQ ID NO: 925 - protein, 124 aa, Artificial sequence
  VH
QVQLVQSGAEVKKPGSSVKVSCKASGGTFSSYAISWVRQAPGQGLEWMGRIIPIFGTANYAQKFQGRVTITADESTSTAYMELSSLRSEDTAVYYCARAAYYYDSSGYGWFDPWGQGTLVTVSS

SEQ ID NO: 926 - protein, 122 aa, Artificial sequence
  VH
QVQLVQSGAEVKNPGSSVKVSCKTSGATFTTYAINWVRQAPGQGLEWIGGIFPIFTAAVYAQKFQGRVTITADESTTTAYLELSSLRSEDTAVYYCARGDYTEYSYYYMDVWGKGTTVTVSS

SEQ ID NO: 927 - protein, 122 aa, Artificial sequence
  VH
EVQLLESGGGLVQPGGSLRLSCAASGFTLSSYAMSWVRQAPGRGLEWVSAVSGSGGSTYYADSVKGRFTISRDNSKNMLYLQMNSLRAEDTAIYYCALPTGASSSYSGPNYWGQGTLVTVSS

SEQ ID NO: 928 - protein, 123 aa, Artificial sequence
  VH
QVQLVESGGGVVQPGRSLRLSCVASGFTFSNYDMHWVRQAPGKGLEWVTVISSDGNNRRYADSVKGRFTISRDNSKNMLYLQMNSLKAEDTAVYYCARDEVIAVATGEGMDVWGQGTTVTVSP

SEQ ID NO: 929 - protein, 124 aa, Artificial sequence
  VH
EVQLVESGGGLVQPGRSLRLSCAASGFTFDDYAMHWVRQAPGKGLEWVSGISWNSGSIGYADSVKGRFTISRDNAKNSLYLQMNSLRAEDTALYYCAKDMGYDILTGSGLGDYWGQGTLVTVSS

SEQ ID NO: 930 - protein, 121 aa, Artificial sequence
  VH
EVQLVESGGGLVQPGRSLRLSCAASGFTFDDYAMHWVRQAPGKGLEWVSGISWNSGTIGYEDSVKGRFIISRDNAKNSLYLQMNSLRAEDTALYYCAKEPLFGETYGMDVWGQGTTVTVSS

SEQ ID NO: 931 - protein, 127 aa, Artificial sequence
  VH
EAQLVESGGGLVQPGRSLTVSCAVSGFTFDDYAMHWVRQAPGKGLEWVSSISWNSEKIAYADSVKGRFTVSRDNAKNSLYLQMTSLRPEDTALYYCARDKGSGSYYSGAYYYYMDVWGKGTTVTVSS

SEQ ID NO: 932 - protein, 120 aa, Artificial sequence
  VH
EVQLVESGGGLVPPGGSLRLSCAASGFTFSSYTINWVRQAPGKGLEWVSYINSGSSIIYYADSVKGRFTISRDNAKNSLYLQMNSLRAEDTAVYYCATFNSGNDNAYEYWGQGTLVTVSS

SEQ ID NO: 933 - protein, 125 aa, Artificial sequence
  VH
EVRLVESGGGWVQPGGSLRLSCEASTFIFSNSEMNWVRQAPGKGLEWVSYISSSDNSVHYADSVKGRFTISKDSAKKTLYLQMNSLRAEDTGVYYCAREYPDFWSGHYYYYMDVWGKGTTVTVSS

SEQ ID NO: 934 - protein, 115 aa, Artificial sequence
  VH
EVQLVESGGGLVQPGGSLRLSCAASGFTVSSNYMSWVRQAPGKGLEWVSVIYSGGSTYYADSVKGRFTISRDNSKNTLYLQMNSLRAEDTAVYYCARLPYGMDVWGQGTTVTVSS

SEQ ID NO: 935 - protein, 123 aa, Artificial sequence
  VH
QVKLQQWGAGLVKPSETLSRTCAVYGGSFSGYFWSWIRQSPGKGLEWIGEINHSGKTNYSPSLKSRVSISVDTSKNQFSLKLTSVTAADTAVYYCARGLYDKSGYRSDGFDSWGQGAVVTVYS

SEQ ID NO: 936 - protein, 125 aa, Artificial sequence
  VH
QVQLQQWGAGLLKPSETLSRTCAVYGGSFSGYYWTWIRQPPGKGLEWIGEINHSGSTNYNPSLKSRITMSVDTSKNQFSLELRSVSAADTAVYYCARGFEGYCSGGRCYSYFDYWGQGTLVTVSS

SEQ ID NO: 937 - protein, 117 aa, Artificial sequence
  VH
QVQLQESGPGLVKPSETLSLTCTVSGGSLSSYYWNWIRQPPGKGLEWIGYMYNSGSTNYNPSLKSRVTISVDTSKNQFSLKLSSVTAADTAVYYCARVKNWDYGLYWGQGTLVIVSS

SEQ ID NO: 938 - protein, 118 aa, Artificial sequence
  VH
QVQLQESGPGLVKPSETLSLTCTVSGGSISTFYWNWVRQPPGKGLEWIGFIYYSGRTNYNPSLKSRVTISVDTSKNQFSLKVSSVTAADTAVYYCARDGQSDWHFDLWGRGTLVTVSS

SEQ ID NO: 939 - protein, 116 aa, Artificial sequence
  VH
QVQLQESGPGLVKPSETLSLTCTVSGGSVSSYFWSWLRQPPGKGLEWIAYIFYTGTSNYNPSLKSRVTISLDTSKNQMSLNLSSVTTADTAVYYCARVYGDYLDHWGQGTVVTVSS

SEQ ID NO: 940 - protein, 128 aa, Artificial sequence
  VH
QITLKESGPTLVKPTQTLTLTCTFSGFSFNTPGVGVGWIRQPPGKAPECLALIYWDDEKLYNPSLKTRLTITKDPSKNQVVLTMTTMDPVDTATYYCAHRSFLYNIFNGYSYAPFDYWGQGSMVTVSS

SEQ ID NO: 941 - protein, 118 aa, Artificial sequence
  VH
QVQLVESGGGVVQPGRSLRLSCAASGFSFSNHGMHWVRQAPGKGLEWVAVIWYDGDNRFYADSVRGRFTISRDNSKNTLFLQMDSLRAEDTGIYYCAKDLFSGDRDFWGQGTLVTVSS

SEQ ID NO: 942 - protein, 122 aa, Artificial sequence
  VH
QVQLVESGGGVVQPGRSLRLSCVASGFTFSNSAMHWVRQAPGMGLEWVAVIYYDGSNEYYADSVKGRFTISRDNSKNTLYLQMNSLRADDTAVYYCAKDSGAVLLWFGADFWGQGTLVTVSS

SEQ ID NO: 943 - protein, 126 aa, Artificial sequence
  VH
DVQLVESGGSLVQPGGSLRLSCAASEFTFSSYEMNWVRQAPGKGLEWVSYIDSSSTTIYYADSVKGRFTISRDNAKNSLYLQMNSLRAEDTAVYYCAREGAYDIWRGSYMRAYDHWGQGTLVTVSS

SEQ ID NO: 944 - protein, 116 aa, Artificial sequence
  VH
QVQLVQSGSELKKPGASVKVSCKASGYTFTNFAINWVRQAPGQGLEWMGWINTKTGIPTYAQGFTGRFVFSLDTSVSTAYLQISGLKAEDTAVYYCARYIEMFDPWGQGTLVTVSS

SEQ ID NO: 945 - protein, 125 aa, Artificial sequence
  VH
QVQLVQSGAEVKKPGASVKVSCKASGYTFTSYGISWVRQAPGQGLEWMGWISAYNGNTNYAQKLQGRVTMTTDTSTSTAYMELRSLRSDDTAVYYCARQAYGDYGWDYYYGMDVWGQGTTVTVSS

SEQ ID NO: 946 - protein, 127 aa, Artificial sequence
  VH
QVQLAEAGGGVVQPGTSLRLSCVVSGFSFSRYGMHWVRQAPGKGLEWVAVISHDDSQKYYGDSVKGRFTISRDNSKDTLYLEMTSLRLEDTAVYYCLKDWDWEYEDSRPTLRGSVYWGQGTLVIVSA

SEQ ID NO: 947 - protein, 124 aa, Artificial sequence
  VH
QVQLVESGGGAVQPGRSLRLSCVTSGFNFNSYTMHWIRQAPGKGLEWVAVISYEGSKKYYADSLKGRFTISKDNSKNTVYLEMNSLTTEDTAVYYCARGSVFWFGEGKNWFDPWGQGTLVTVSS

SEQ ID NO: 948 - protein, 124 aa, Artificial sequence
  VH
QVQLVESGGGAVQPGRSLRLSCVTSGFNFNSYTMHWIRQAPGKGLEWVAVISYEGSKKYYADSLKGRFTISKDNSKNTVYLEMNSLTTEDTAVYYCARGSVFWFGEGKNWFDPWGQGTLVIVSS

SEQ ID NO: 949 - protein, 120 aa, Artificial sequence
  VH
EVQLVESGGGLVQPGGSLRLSCAASGFTFSSYEMNWVRQAPGKGLEWVSYISSSGSTIYYADSVKGRFTISRDNAKNSLYLQMNSLRAEDTAVYYCAREDSSGWSRGDYWGQGTLVTVSS

SEQ ID NO: 950 - protein, 123 aa, Artificial sequence
  VH
QVQLVQSGSELKKPGASVKVSCKASGYIFTSYGMNWVRQAPGQGLEWMGWINTNTGSPMYAQGFTGRFVFSLDTSVSTAYLQISSLKAEDTAVYYCARRFVVREVEYNWFDPWGQGTLVTVSS

SEQ ID NO: 951 - protein, 127 aa, Artificial sequence
  VH
QAQLVQSGSEVRKPGASVKVSCKASGYSFNDYGITWVRQAPGQGLEWMGWISAYNGETNYAQKFQDTVTMTTDTSTNTAYLELRSLRFADTALYYCARDGYCNSMRCYRYYHGMDVWGQGTTVTVSS

SEQ ID NO: 952 - protein, 125 aa, Artificial sequence
  VH
QVQLVQSGAEVKKPGASVKVSCKVSGYTLTELSMHWVRQAPGKGLEWMGGFDPEDGETIYAQKFQGRVTMTEDTSTDTAYMELSSLRSEDTAVYYCATGPTAKPNKQWGYWFDPWGQGTLVTVSS

SEQ ID NO: 953 - protein, 119 aa, Artificial sequence
  VH
QVQLVQSGAEVKKPGASVKVSCKASGNTFSTYYIHWVRQAPGQGLEWMGIISPSGDDANYTQKFQDRVTMTRDTPTNTVYLELSSLRSEDTAVYYCASPVSVEQDFDIWGQGTMVTVSA

SEQ ID NO: 954 - protein, 116 aa, Artificial sequence
  VH
EVQLVESGGGSVKPGGSLRLSCAASGFTFSDVWMSWVRQAPGKGLEWVGRIRSKSDGGTTDYAAPMKERFSISRDDAKNTMYLQMNSLKTEDTGVYYCTTPVGDFWGQGTMVTVSS

SEQ ID NO: 955 - protein, 119 aa, Artificial sequence
  VH
EVQLMESGGGLVKPGGSLRLSCAGSGLTFDNAWMSWVRQAPGKGLEWVGRVKSKTDGGTTDYAAPVKGRFTISRDDSKNTLFLQMNSLKTEDTAVYYCSTSHPPFFDYWGQGTLVTVSS

SEQ ID NO: 956 - protein, 121 aa, Artificial sequence
  VH
QVQLVESGGGVVQPGRSLRLSCAASRFTFSSYAMHWVRQAPGKGLEWVALISYDGSNKYYADSVKGRFTISRDNSKNTLYLQMDSLRPEDTAVYYCARGLWQLVSPVFDYWGQGTLVTVSS

SEQ ID NO: 957 - protein, 122 aa, Artificial sequence
  VH
EVQLVESGGVVVQPGGSLRLSCAASGFTFDDYAMHWVRQAPGKGLEWVSLISWDGGSTYYADSVEGRFTISRDNSKNSLYLQMNSLRAEDSALYYCAKVTNRGVRGLYFDYWGQGTLVTVSS

SEQ ID NO: 958 - protein, 119 aa, Artificial sequence
  VH
QVQLVQSGAEVKKPGASVKVSCKASGNTFTTYYIHWVRQAPGQGLEWMGIISPSGDDANYTQKFQDRVTMTRDTPTNTVYLELSSLRSEDTAVYYCASPVSVEQDFDIWGQGTMVTVSA

SEQ ID NO: 959 - protein, 116 aa, Artificial sequence
  VH
QVQLVQSGAEVKKPGSSVNVSCKASGGTFNSYTLSWVRQAPGQGLEWMGRIVPMLGITNYAQKFQDRVTITADESTATAYMDLSSLTSEDTAVYFCAINTLLVTAWGQGTLVTVSS

SEQ ID NO: 960 - protein, 128 aa, Artificial sequence
  VH
QITLKESGPTLVKPTQTVTLTCTFSGFSLNTPGAGVGWIRQPPGQALECLALIYWDDDKRYSPSLRSRLSIAKDTAKNQVVLTVTNLDPVDTATYYCVHRSFLYDIFSGYSYAPFDYWGQGMLVTVSS

SEQ ID NO: 961 - protein, 128 aa, Artificial sequence
  VH
QITLKESGPTLVKPTQTLTLTCTFSGFSFNTPGVGVGWIRQPPGKAPECLGLIYWDDEKRYSPSLKSRLTITKDPSKNQVVLTMTTMDPVDTATYYCAHRSFLYNIFDGYSYAPFDYWGQGSMVTVSS

SEQ ID NO: 962 - protein, 133 aa, Artificial sequence
  VH
QVQLVESGGGLVKPGGSLRLSCAASGFTFTFSDYYMNWIRQAPGGGLEYIAYISSGGDAIYYADSVKGRFIISRDNSESSVSLQMTSLRADDTAVYYCAGGADCRRTSCHYLVSNREEYMGVWGKGTTVTVSS

SEQ ID NO: 963 - protein, 126 aa, Artificial sequence
  VH
EVQLVESGGGLVKPGGSLRLSCAASGFTFSDYYMNWVRQAPGKGLEWVSSMSSDSDYIFYADSVKGRFTISRDNAKNSLYLQMNSLRAEDTAVYYCARGLVLSGTRYSYFYGMDVWGQGTTVTVSS

SEQ ID NO: 964 - protein, 127 aa, Artificial sequence
  VH
QVHLAEAGGGVVQPGRSLRLSCVVSGFSFSRYGMHWVRQAPGKGLEWVAVISHDESQKYYGESVKGRFTISRDNSKDTVYLQMDSLRVEDTAVYYCVKDWDWEYEDNRPTLRGSVYWGQGTLVIVSA

SEQ ID NO: 965 - protein, 127 aa, Artificial sequence
  VH
QVQLAEAGGGVVPPGRSLRLSCVVSGLSFSRYGMHWVRQAPGKGLEWVAVISHDESQKYYGESVKGRFTISRDNSKDTLYLQMDGLRVEDTAMYYCVKDWDWEYEESRPTLRGSVYWGQGALVIVSA

SEQ ID NO: 966 - protein, 125 aa, Artificial sequence
  VH
QVQLVESGGGVVQPGRSLRLSCATSGFSFNNFGMHWVRQAPGKGLEWLAVISYEGSKKYYADSLKGRFTISRDGSKDTLYLQLSSLGVEDTAVYHCAKGGPIFWLGEGKNWFDAWGPGTPVIVSS

SEQ ID NO: 967 - protein, 122 aa, Artificial sequence
  VH
QVQLVESGGGVVQPGRSLRLSCAASGFTLSSYAMHWVRQAPGKGLEWVAVISYDGSNKYYRDSVKGRFTISRDNSKNTLYLQINSLRVDDTAVYYCARDKGGILMLRGADFWGQGTLATVSS

SEQ ID NO: 968 - protein, 121 aa, Artificial sequence
  VH
EVQLVESGGGLVQPGGSLRLSCAASGFTFSSYEMNWVRQAPGKGLEWVSYITSSGNTILYADSVKGRFTISRDNAKNSLYLRMNSLRAEDTALYYCARTLIAAAGSAFDIWGQGTMVTVSS

SEQ ID NO: 969 - protein, 126 aa, Artificial sequence
  VH
EVQLVESGGGLGLPGGSLRLSCAASGFTFSSYAMNWVRQAPGKGLEWISYISSSSGTIYYADSVKGRFTISRDNAKNSLFLQMNSLRDEDTAVYYCARGPTSITMIVVVDDAFDIWGQGTMVTVSS

SEQ ID NO: 970 - protein, 125 aa, Artificial sequence
  VH
QVQLQESGPGLVKPSETLSLTCSVSGGSISPYSWSWIRQPPGKGLEWIGYIYYTGKTNYNSSLKTRVTISLDTSKNQFSLRLTSVTTADTAIYYCARVMNSSWYTRYYYNYMDVWGKGTSVTVSS

SEQ ID NO: 971 - protein, 125 aa, Artificial sequence
  VH
QLQLQESGPRLVKPSATLSLTCTVSGDSIRSSSFYWGWIRQPPEKGLEWLGSVYNSGTAYYNPSLKSRVSVSVDTSKNQFSLKVNSVTAADTAVYYCARRGGGCSEGVCYNFDRWGQGTLVTVSS

SEQ ID NO: 972 - protein, 115 aa, Artificial sequence
  VH
QVQLVQSGSELKKPGASVKISCKAFGYSFTTYAMNWVRQAPGRGLEWMGWIDTNTGKPTYARGFTGRFVFSLDTSVRTSYMQINTLKAEDTAVYYCARGDPRDYWGQGTLVTVSS

SEQ ID NO: 973 - protein, 123 aa, Artificial sequence
  VH
QVQLVQSGAEVKKPGSSVKVSCKASGGTFSSYAISWVRQAPGQGLEWMGRIIPIFGTANYAQKFQGRVTITADESTSTAYMELSSLRSEDTAVYYCARGSYYYDSSGYYLDYWGQGTLVTVSS

SEQ ID NO: 974 - protein, 124 aa, Artificial sequence; identical to SEQ ID NO: 925
  VH

SEQ ID NO: 975 - protein, 126 aa, Artificial sequence
  VH
EVQLVESGGGLVKPGGSLRLSCAASGFTFSHAWMCWVRQAPGKGLEWVGRIKSNTDGGTTDYAAPVKGRFTISRHDSKNTLYLQLNSLKTEDTAVYYCTTDLGATGIYYYYYMDVWGKGTTVTVSS

SEQ ID NO: 976 - protein, 129 aa, Artificial sequence
  VH
EVQLVESGGGLVQPGGSLRLSCAASGFTFSSYEMNWVRQAPGKGLEWVSYISSSGSTIYYADSVKGRFTISRDNAKNSLYLQMNSLRAEDTAVYYCARFPRDYYDSSGYLIQEGNFDYWGQGTLVTVSS

SEQ ID NO: 977 - protein, 123 aa, Artificial sequence
  VH
EVQLVESGGGLIQPGGSLRLSCAASGFTVSSNYMSWVRQAPGKGLEWVSVIYSGGSTYYADSVKGRFTISRDNSKNTLYLQMNSLRAEDTAVYYCARVTRAGAAGDGGAFDIWGQGTMVTVSS

SEQ ID NO: 978 - protein, 118 aa, Artificial sequence
  VH
QVQLQESGPGLVKPSETLSLTCTVSGGSISSYYWSWIRQPPGKGLEWIGYIYYSGSTKYNPSLKSRVTISVDTSKNQFSLKLSSVTAADTAVYYCARSVVPVAGTDYWGQGTLVTVSS

SEQ ID NO: 979 - protein, 127 aa, Artificial sequence
  VH
QVQLVQSGAEVKKPGASVKVSCKASGYTFTTYGISWVRQAPGQGLEWMGWISAYNGNTNYAQKLQGRVTMTTDTSTSTAYMELRSLRSDDTAVYYCARDQHPGYPALVYYYYYMDVWGKGTTVTVSS

SEQ ID NO: 980 - protein, 117 aa, Artificial sequence
  VH
QVQLVQSGAEVKKPGASVKVSCKASGYTFTNYGITWVRQAPGQGLEWMGWISTYSGNTNYAQKLQGRVTMTTDTSTSTAYMELRSLRSDDTAVYYCARDNIQTFDYWGQGTLVTVSS

SEQ ID NO: 981 - protein, 122 aa, Artificial sequence
  VH
QVQLVQSGAEVKKPGASVKVSCKVSGYTLTELSMHWVRQAPGKGLEWMGGFDPEDGETIYAQKFQGRVTMTEDTSTDTAYMELSSLRSEDTAVYYCATSSPVAGYNSWFDPWGQGTLVTVSS

SEQ ID NO: 982 - protein, 121 aa, Artificial sequence
  VH
QVQLVQSGAEVKKPGASVKVSCKVSGYTLTELSMHWVRQAPGKGLEWMGGFDPEDGETIYAQKFQGRVTMTEDTSTDTAYMELSSLRSEDTAVYYCATGPAVIPLRWFDPWGQGTLVTVSS

SEQ ID NO: 983 - protein, 122 aa, Artificial sequence
  VH
QVQLVQSGAEVKKPGASVKVSCKVSGYTLTELSMHWVRQAPGKGLEWMGGFDPEDGETIYAQKFQGRVTMTEDTSTDTAYMELSSLRSEDTAVYYCATAPAAAGPTDWFDPWGQGTLVTVSS

SEQ ID NO: 984 - protein, 121 aa, Artificial sequence
  VH
QVQLVQSGAEVKKPGASVKVSCKVSGYTLTELSMHWVRQAPGKGLEWMGGFDPEDGETIYAQKFQGRVTMTEDTSTDTAYMELSSLRSEDTAVYYCAISPSVHSLWWFDPWGQGTLVTVSS

SEQ ID NO: 985 - protein, 128 aa, Artificial sequence
  VH
QVQLVQSGAEVKKPGASVKVSCKASGYTFTSYAMHWVRQAPGQRLEWMGWINAGNGNTKYSQKFQGRVTITRDTSASTSYMELSSLRSGDTAVYYCARDEIHYDILTGYYNRFWFHPWGQGTLVTVSS

SEQ ID NO: 986 - protein, 128 aa, Artificial sequence
  VH
QVQLVQSGAEVKKPGSSVKVSCKASGGTFSSYAISWVRQAPGQGLEWMGGIIPIFGTANYAQKFQGRVTITADESTSTAYMELSSLRSEDTAVYYCARDAETGYYDSSGYPINWFDPWGQGTLVTVSS

SEQ ID NO: 987 - protein, 124 aa, Artificial sequence
  VH
QVTLKESGPVLVKPTETLTLTCTVSGFSLSNARMGVSWIRQPPGKALEWLAHIFSNDKKSYSTSLKSRLTISKDTSKSQVVLTMTNMDPVDTATYYCARHYYDTGAYYVPFDHWGQGTLVTVSS

SEQ ID NO: 988 - protein, 122 aa, Artificial sequence
  VH
QITLKESGPTLVKPTQTLTLTCTFSGFSLSTTGVGLAWIRQPPGKALEWLAFIYWDDDKRYSPSLQTRLTITKDTSKNQVVLTLTNMDPMDTATYYCAHFQGFGESEYFQHWGQGTLVTVSS

SEQ ID NO: 989 - protein, 119 aa, Artificial sequence
  VH
QITLKESGPTLVKPTQTLTLTCTFSGFSLSTSGVGVGWIRQPPGKALEWLALIFWDDDKRYSPSLKSRLTITKDTSKNQVVLTMTNMDPVDTATYYCAHRHPLTGFDSWGQGTLVTVSS

SEQ ID NO: 990 - protein, 120 aa, Artificial sequence
  VH
EVQLVESGGGLVKPGGSLRLSCAASGFTFSSYSMNWVRQAPGKGLEWVSSISSSSSYIYYADSVKGRFTISRDNAKNSLYLQMNSLRAEDTAVYYCATPRGYSYGPLDYWGQGTLVTVSS

SEQ ID NO: 991 - protein, 120 aa, Artificial sequence; identical to SEQ ID NO: 829
  VH

SEQ ID NO: 992 - protein, 126 aa, Artificial sequence
  VH
QVQLVESGGGVVQPGRSLRLSCAASGFTFSSYAMHWVRQAPGKGLEWVAVISYDGSNKYYADSVKGRFTISRDNSKNTLYLQMNSLRAEDTAVYYCARDRVDKGYDFWSSWYFDLWGRGTLVTVSS

SEQ ID NO: 993 - protein, 120 aa, Artificial sequence
  VH
QVQLVESGGGVVQPGRSLRLSCAASGFTFSSYAMHWVRQAPGKGLEWVAVISYDGSNKYYADSVKGRFTISRDNSKNTLYLQMNSLRAEDTAVYYCASGGGSYFDAFDIWGQGTMVTVSS

SEQ ID NO: 994 - protein, 121 aa, Artificial sequence
  VH
QVQLVESGGGVVQPGRSLRLSCAASGFTFSSYAMHWVRQAPGKGLEWVAVISYDGSNKYYADSVKGRFTISRDNSKNTLYLQMNSLRAEDTAVYYCARDRSGSYYGGFDYWGQGTLVTVSS

SEQ ID NO: 995 - protein, 121 aa, Artificial sequence
  VH
QVQLVESGGGVVQPGWSLRLSCAASGFTFGSYGMHWVRQAPGKGLEWVALIWNDGSNKYYADSVKGRFTISRDKSKNTLYLQMNSLRAEDTAVYYCAKAVYGGNSVYFDYWGQGTLVTVSS

SEQ ID NO: 996 - protein, 121 aa, Artificial sequence
  VH
QVQLVESGGGVVQPGRSLRLSCAASGFTFSSYAMHWVRQAPGKGLEWVAVISYDGSNKYYADSVKGRFTISRDNSKNTLYLQMNSLRAEDTAVYYCARIYGGNYENYFDYWGQGTLVTVSS

SEQ ID NO: 997 - protein, 121 aa, Artificial sequence
  VH
QVQLVESGGGVVQPGRSLRLSCAASGFTFSIYAMHWVRQAPGKGLEWVAVISYDGSNKYYADSVKGRFTISRDNSKNTLYLQMNSLRAEDTAVYYCARESEAGTTPSFDYWGQGTLVTVSS

SEQ ID NO: 998 - protein, 120 aa, Artificial sequence
  VH
EVQLVESGGGLVQPGGSLRLSCAASGFTVSSNYMSWVRQAPGKGLEWVSVIYSGGSTNYADSVKGRFTISRDNSKNTLYLQMNSLRAEDTAVYYCARSLVRGVITYFDYWGQGTLVTVSS

SEQ ID NO: 999 - protein, 115 aa, Artificial sequence
  VH
EVQLVESGGGLVQPGGSLRLSCAASGFTFSNYWMNWVRQAPGKGLEWVANIKEDGSETYYVDSVKGRFTISRDNAKNSLYLQMNSLRAEDTAVYYCARGLSMEVWGQGTTVTVSS

SEQ ID NO: 1000 - protein, 124 aa, Artificial sequence
  VH
QVQLQQWGAGLLKPSETLSLTCAVYGGSFSGYYWSWIRQPPGKGLEWIGEIDHSGSTNDNPSLKSRVTISVDTSKNQFSLKLSSVTAADAAVYYCARGGYSSSWYGTKYYFDYWGQGTLVTVSS

SEQ ID NO: 1001 - protein, 124 aa, Artificial sequence
  VH
QVQLQQWGAGLLKPSETLSLTCAVYDGSFSGHYWSWIRQPPGKGLEWIGEINHSGSTNYNPSLKSRVTISVDTSKNQFSLKLSSVTAADTAVYYCARGPTVTTFFRRNAWFDPWGQGTLLTVSS

SEQ ID NO: 1002 - protein, 124 aa, Artificial sequence
  VH
QVQLQQWGAGLLKPSETLSLTCAVYGGSFSGYYWSWIRQPPGKGLEWIGEINHSGSTNYNPSLKSRVTISVDTSKNQFSLKLSSVTAADTAVYYCARGRYSSGWYGSRNWFDPWGQGTLVTVSS

SEQ ID NO: 1003 - protein, 121 aa, Artificial sequence
  VH
QVQLQESGPGLVKPSETLSLTCTVSGGSISSYYWSWIRQPPGKGLEWIGYIYYSGSTNYNPSLKSRVTISVDTSKNQFSLKLSSVTAADTAVYYCARLSMGAARQSGFDPWGQGTLVTVSS

SEQ ID NO: 1004 - protein, 130 aa, Artificial sequence
  VH
QVQLQESGPGLVKPSETLSLTCTVSGGSISSYYWSWIRQPPGKGLEWIGYIYYSGSTNYNPSLKSRVTISVDTSKNQFSLKLSSVTAADTAVYYCARDGGRDGYNELGARVYYYYGMDVWGQGTTVTVSS

SEQ ID NO: 1005 - protein, 115 aa, Artificial sequence
  VH
EVQLVQSGAEVKKPGESLRISCKGSGYNFTSYWISWVRQMPGKGLEWMGTIDPSDSYTNYRPSFQGHVTISADKSINTAYLQWSSLKASDTAMYYCARIGSYGIWGQGTLVTVSS

SEQ ID NO: 1006 - protein, 125 aa, Artificial sequence
  VH
QVQLVQSGSELKKPGASVKVSCKASGYTFTSYAMNWVRQAPGQGLEWMGWINTNTGNPTYAQGFTGRFVFSLDTSVSTAYLQISSLKAEDTAVYYCAKLGCSGGSCYYYYGMDVWGQGTTVTVSS

SEQ ID NO: 1007 - protein, 123 aa, Artificial sequence
  VH
EVQLVESGGGLIQPGGSLRLSCAASGFTVSSNYVSWVRQAPGTGLEWVSVVYSGGHAYYADSVKGRFTMSRDNSENAVYLQMNSLRAEDTAVYYCARGDHYYDRSGPHKFDYWGQGTLVTVSS

SEQ ID NO: 1008 - protein, 128 aa, Artificial sequence
  VH
QVQLQESGPGLVKPSQTLSLTCTVSGGSISSGLYHWSWIRQPAGKGLEWIGRIFSSGSTAYSPSLKSRVIISADTSKNQFSLKLSSVTAADTAVYYCARDSPLKFDSFGYPLYGMDVWGQGTTVTVSS

SEQ ID NO: 1009 - protein, 121 aa, Artificial sequence
  VH
QVQLVQSGAEVKKPGSSVKVSCKASGGTFSSYTISWVRQAPGQGLEWMGRIIPILGIANYAQKFQGRVTITADKSTSTAYMELSSLRSEDTAVYYCARGIVGATPGYFDYWGQGTLVTVSS

SEQ ID NO: 1010 - protein, 120 aa, Artificial sequence
  VH
QVQLVQSGAEVKKPGASVKVSCKASGFTFGRHGITWVRQAPGQGLEWMGWISTYSGNTNYAQNLQGRVTMTTDTSTNTAYMELRSLFFDDTAVYYCAKAVSGWPIYFDAWGQGTLVTVSS

SEQ ID NO: 1011 - protein, 120 aa, Artificial sequence
  VH
QIQLVQSGAEVKKPGASVRVSCKASGFTFGRYGITWVRQVPGQGLEWMGWISTYSGNTNYAQNLQGRVTMTTDTSTNTAYMELRSLFFDDTAMYYCAKAVSGWPIYFDAWGQGTLVTVSS

SEQ ID NO: 1012 - protein, 122 aa, Artificial sequence
  VH
QITLEESGPTLVKPTQTLTLTCTFSGFSLTTRGEGVAWIRQPPGKALEWLALIYWDDDQRYTPSLDSRLTITKDISKNHVVLTLTDVEPVDTATYFCAHTIHSGYDRTFDSWGQGTLVIVSS

SEQ ID NO: 1013 - protein, 121 aa, Artificial sequence
  VH
QVQLVQSGSELKKPGASVKVSCKASGYTFTFYTIYWVRQAPGQGLEWMGWINTNTGTPTYAQGFTGRFVFSLDTSVSTAYLQISSLKAEDTAIYYCAREESYSSSSPLDYWGPGTLVAVSS

SEQ ID NO: 1014 - protein, 125 aa, Artificial sequence
  VH
QMQLVQSGPEVKKPGTSVKVSCKASGFTFTSSAVQWVRQARGQRLEWIGWIVVGSGNTNYAQKFQERVTITRDMSTSTAYMELSSLRSEDTAVYYCAAGSDFWSGYYVNYYMDVWGKGTTVTVSS

SEQ ID NO: 1015 - protein, 120 aa, Artificial sequence
  VH
QVTLRESGPALVKPTQTLTLTCTFSGFSLSTSGMCVSWIRQPPGKALEWLARIDWDDDKYYSTSLKTRLTISKDTSKNQVVLTMTNMDPVDTATYYCARLTAAGVYFDYWGQGTLVTVSS

SEQ ID NO: 1016 - protein, 125 aa, Artificial sequence
  VH
EVQLLESGGGVVQPGGSLRLSCAASGFTFTTYAMNWVRQAPGRGLEWVSAISDSGGSAYYADSVKGRFTISRDNSKNTLYLQMNSLRAEDTAVYYCAKTRGRGLYDYVWGSKDYWGQGTLVTVSS

SEQ ID NO: 1017 - protein, 125 aa, Artificial sequence
  VH
EVQLLESGGGVVQPGGSLRLSCAASGFAFTTYAMNWVRQAPGRGLEWVSAISDGGGSAYYADSVKGRFTISRDNSKNTLYLQMNSLRAEDTAVYYCAKTRGRGLYDYVWGSKDYWGQGTLVTVSS

SEQ ID NO: 1018 - protein, 123 aa, Artificial sequence
  VH
QVQLVQSGAEVKKPGASVKVSCKASGYTFTSYGISWVRQAPGQGLEWMGWISAYNGNTNYAQKLQGRVTMTTDTSTSTAYMELRSLRSDDTAVYYCARDESGSYYGDQAFDIWGQGTMVTVSS

SEQ ID NO: 1019 - protein, 131 aa, Artificial sequence
  VH
QAQLVQSGPEVKKPGASVKVSCEASGYTFSRYGISWVRQAPGQGLEWMGWISGYNGNTTSEQKVQGRVTMTTDTSTNKVFLELRSLRSDDTAMYYCARDRRARAYEIPFGSDHYYFGMDVWGQGTTVTVSS

SEQ ID NO: 1020 - protein, 124 aa, Artificial sequence
  VH
QVQLVQSGAEVKKPGASVKVSCKASGYTFTGYYMHWVRQAPGQGLEWMGWINPNSGGTNYAQKFQGRVTMTRDTSISTAYMELSRLRSDDTAVYYCARDYYGSGSYPIGYMDVWGKGTTVTVSS

SEQ ID NO: 1021 - protein, 128 aa, Artificial sequence
  VH
EVQLVESGGGLAKPGGSLRVSCVVSGSGFTFRNAWMSWVRQAPGKGLEWVGRIKSKNDGGTTDYAASVKGRFTISRDDSKNSLDLQMQSLKTEDTAVYYCTTSYCSTKVCFDYWFDPWGQGTLVTVSS

SEQ ID NO: 1022 - protein, 122 aa, Artificial sequence
  VH
QVQLVESGGDVVQPGNSLRLSCAASGFTFNFYGMHWVRQAPGKGLEWVAFISYDGNKRYYVDSVRGRFTASRDNSKNTLFLQMNGLRNDDSAVYYCASNLYATSPYGGVKNWGRGTLVAVAS

SEQ ID NO: 1023 - protein, 121 aa, Artificial sequence
  VH
EVQLVESGGGLVQPGRSLRLSCAASGFTFDDYAMHWVRQAPGKGLEWVSGISWNSGSIGYADSVKGRFTISRDNAKNSLYLQMNSLRAEDTALYYCAKDIGSGSPDAFDIWGQGTMVTVSS

SEQ ID NO: 1024 - protein, 122 aa, Artificial sequence
  VH
GVQLVESGGGLVQPGRSLRLSCAASGFIFDDYTMHWVRQAPTKGLEWVSGITWNYATVGYADSVRGRFTISRDNVKNSLFLQIHSLRPDDTAFYYCVKDLEFRGGTGGFDLWGQGTLVTVSS

SEQ ID NO: 1025 - protein, 120 aa, Artificial sequence
  VH
QVQLVQSGAEVKKPGASVKVSCKASGYTFTSYGISWVRQAPGQGLEWMGWISAYNGNTNYAQKLQGRVTMTTDTSTSTAYMELRSLRSDDTAVYYCARDGHSAWGAFDIWGQGTMVTVSS

SEQ ID NO: 1026 - protein, 120 aa, Artificial sequence
  VH
QVQLVQSGAEVKKPGASVKVSCKASGYTFTSYGISWVRQAPGQGLEWMGWISAYNGNTNYAQKLQGRVTMTTDTSTSTAYMELRSLRSDDTAVYYCARDHPTLRRAFDYWGQGTLVTVSS

SEQ ID NO: 1027 - protein, 122 aa, Artificial sequence
  VH
QVELVQSGAQVRKPGASVKVSCKASGDTFNDYHMHWVRQAPGQGLEWMGWINPNSGETRYSQRFQGTVTMTRDTSISTVYMELRSLPSDDTAVYFCARDRGSSSWWGWLDPWGQGTLVTVSS

SEQ ID NO: 1028 - protein, 124 aa, Artificial sequence
  VH
QVQLVQSGAEVKKPGSSVKVSCKASGGTFSSYAISWVRQAPGQGLEWMGGIIPIFGTANYAHKFQGRVTITADESTSTAYMELSSLRSEDTAVYYCATRRGYSGYGAAYYFDYWGQGTLVTVSS

SEQ ID NO: 1029 - protein, 127 aa, Artificial sequence
  VH
QVQLVQSGAEVKKPGSSVKVSCKASGGTFSSYAISWVRQAPGQGLEWMGRIIPILGIANYAQKFQGRVTITADKSTSTAYMELSSLRSEDTAVYYCAREVYVGGEDDYSYYYGLDVWGQGTTVTVSS

SEQ ID NO: 1030 - protein, 129 aa, Artificial sequence
  VH
EVQLVESGGGLVKPGGSLRLSCAASGFTFSNAWMSWVRQAPGKGLEWVGRIKSKTDGGTTDYAAPVKGRFTISRDDSKNTLYLQMNSLKTEDTAVYYCTTDLGEAGPTEWLRSSLFDYWGQGTLVTVSS

SEQ ID NO: 1031 - protein, 126 aa, Artificial sequence
  VH
DIHMAESGGGLVKPGGSLRLSCAVSGLTFTKAWMSWVRQAPGKGPEWVGRIKSRSDGGKIDYAAPVKGRFIISRDDSKNTLYLQMHSLKTEDTALYYCTTSYCNPKVCFDYWFDPWGQGTLVTVSS

SEQ ID NO: 1032 - protein, 127 aa, Artificial sequence
  VH
EVQLLESGGGLVQPGGSLRLSCAASGFTFSTYAMSWVRQAPGKGLEWVSVISGSGGSTYYADSVKGRFTISRDNSKNTLYLQMNSLRAEDTAVYYCAKEYYYDSSGYYYREDAFDIWGQGTMVTVSS

SEQ ID NO: 1033 - protein, 119 aa, Artificial sequence
  VH
EVQLLESGGGLVQPGGSLRLSCAASGFTFSNYAMTWVRQAPGKGLEWVSGISANGRSPYYADSVKGRFTISRDNSKNTMYVQMNSLRVEDTAVYYCAKDGGLTAYLEYWGLGTLVTVSA

SEQ ID NO: 1034 - protein, 121 aa, Artificial sequence
  VH
EVQLLESGGGLVQPGGSLRLSCAASGFTFSSYAMSWVRQAPGKGLEWVSAISGSGGSTYYADSVKGRFTISRDNSKNTLYLQMNSLRAEDTAVYYCATEKWEVVDVCFDYWGQGTLVTVSS

SEQ ID NO: 1035 - protein, 127 aa, Artificial sequence
  VH
QVQLVESGGGVVQPGRSLRLSCAASGFTFSSYGMHWVRQAPGKGLEWVAVISYDGSNKYYADSVKGRFTISRDNSKNTLYLQMNSLRAEDTAVYYCAKDIGWDVVVVAATHGVFDYWGQGTLVTVSS

SEQ ID NO: 1036 - protein, 124 aa, Artificial sequence
  VH
QVQLVESGGGVVQPGRSLRLSCAASGFTFSSYGMHWVRQAPGKGLEWVAVISYDGSNKYYVDSVKGRFTISRDNSKNTLYLQMNSLRAEDTAVYYCAKDPYYYGSGSSNFFDYWGQGTLVTVSS

SEQ ID NO: 1037 - protein, 122 aa, Artificial sequence
  VH
QVQLVESGGGVVQPGWSLRLSCAASGFTFSSFAMYWVRQAPGKGLEWVAVISYDGANKYYADSVKGRFTISRDNSKNTLYLQVNSLRVEDTAVYYCARGPDYYDTGGYFDLWGRGTLVTVSS

SEQ ID NO: 1038 - protein, 121 aa, Artificial sequence
  VH
QVQLVESGGGVVQPGRSLRLSCAASGFTFSNYGMHWVRQAPGKGLEWVAVMWHDGSNKYHSDSVKGRFTISRDNSKNTLYLQMKTLRADDTAVYYCARDGYKQIYWYLDLWGRGTLVTVSS

SEQ ID NO: 1039 - protein, 124 aa, Artificial sequence
  VH
QVQLVESGGGVVQPGRSLRLSCAASGFTFSSYGMHWVRQAPGKGLEWVAVIWYDGSNKYYADSVKGRFTISRDNSKNTLYLQMNSLRAEDTAVYYCAKGEGVYGSGSRYFLDYWGQGTLVTVSS

SEQ ID NO: 1040 - protein, 124 aa, Artificial sequence
  VH
QVQLVESGGGVVQPGRSLRLSCAASGFTFSSYATHWVRQAPGKGLEWVAVISYDGSNKYHADSVKGRFTISRDNSKNTLYLQMNSLRAEDTAVYYCAREWSRGAVAGTGYFDYWGQGTLVTVSS

SEQ ID NO: 1041 - protein, 122 aa, Artificial sequence
  VH
EVQLVESGGGLVQPGRSLRLSCAASGFTFHDYAMHWVRQAPGKGLEWVSGISWNSGSIGYADSVKGRFTISRDNAKNSLYLQMNSLRAEDTALYYCAKVAKLPGDYYGMDVWGQGTTVTVSS

SEQ ID NO: 1042 - protein, 116 aa, Artificial sequence
  VH
EVQLVESGGGLIQPGGSLRLSCAASGVIVSRNYMNWVRQAPGKGLEWVSVIYSGGSTFYADSVKGRFTISRDNSKNTLYLQMNSLRAEDTAVYYCARELRGAFDIWGQGTMVTVSS

SEQ ID NO: 1043 - protein, 117 aa, Artificial sequence
  VH
EVQLVESGGGLVQPGGSLRLSCAASGFTVSSNYMSWVRQAPGKGLEWVSVIYSGGTTYYADSVKGRFTISRHNSKNTLYLQMNSLRAEDTAVYYCARDWGEYYFDYWGQGTLVTVSS

SEQ ID NO: 1044 - protein, 117 aa, Artificial sequence
  VH
EVQLVESGGGLIQPGGSLRLSCAASEFTVSSNYMSWVRQAPGKGLEWVSVIYSGGSTYYADSVKGRFTISRDNSKNTLYLQMNSLRAEDTAVYYCARDYGDLYFDYWGQGTLVTVSS

SEQ ID NO: 1045 - protein, 123 aa, Artificial sequence
  VH
EVQLVESGGGLIQPGGSLRLSCAASGFTVSSNYMSWVRQAPGKGLEWVSVIYSGGSTYYADSVKGRFTISRDNSKNTLYLQMNSLRAEDTAVYYCARDRRVGSPYYYYYMDVWGKGTTVTVSS

SEQ ID NO: 1046 - protein, 117 aa, Artificial sequence
  VH
EVQLVESGGGLVQPGGSLRLSCAASGFTVSSNYMSWVRQAPGKGLEWVSILYSGGTTYYADSVKGRFTISRDNSKNTLYLQMNSLRAEDTAVYYCARDLGDNAFDIWGQGTMVTVSS

SEQ ID NO: 1047 - protein, 116 aa, Artificial sequence
  VH
EVQLVESGGGLVQPGGSLRLSCAASGITVSSNYMSWVRQAPGKGLEWVSVIYSGGSTYYADSVKGRITISRDNSKNTLYLQMNSLRAEDTAVYYCARDRYSGYDFWGQGTLVTVSS

SEQ ID NO: 1048 - protein, 123 aa, Artificial sequence
  VH
EVQLVESGGGLVQPGGSLRLSCAASGFTVSSNYMSWVRQAPGKGLEWVSVIYSGGSTYYADSVKGRFTISRDNSKNTLYLQMNSLRAEDTAVYYCARLSGTGYGGDGGWFDPWGQGTLVTVSS

SEQ ID NO: 1049 - protein, 120 aa, Artificial sequence
  VH
EVQLVESGGGLVQPGGSLRLSCAASGFTFSSYWMHWVRQAPGKGLVWVSRIKSDGSSTSYADSVKGRFTISRDNAKNTLYLQMNSLRAEDTAVYYCAGKKIYYGSSFDPWGQGTLVTVSS

SEQ ID NO: 1050 - protein, 124 aa, Artificial sequence
  VH
QVQLQESGPGLVKPSQTLSLTCTVSGGSISSGGYYWSWIRQHPGKGLEWIGYIYYSGSTYYNPSLKSRVTISVDTSKNQFSLKLSSVTAADTAVYYCARGGSGSGWYGGRFDYWGQGTLVTVSS

SEQ ID NO: 1051 - protein, 127 aa, Artificial sequence
  VH
QVQLQESGPGLVKPSQTLSLTCTVSGGSISSGGYYWSWIRQHPGKGLEWIGYIYYSGSTYYNPSLKSRVTISVDTSKNQFSLKLSSVTAADTAVYYCARVWRETYYYDSSGDSFDYWGQGTLVTVSS

SEQ ID NO: 1052 - protein, 120 aa, Artificial sequence
  VH
QVQLQQWGAGLLKPSETLSRTCAVYGGSFSGYYWTWIRQSPGKRLEWIGEISHGGKTNYNIFFEGRVTLSVDSSKSQFSLTLASVTAADTAIYYCARGRSITGIRDVDFWGQGALVTVSS

SEQ ID NO: 1053 - protein, 120 aa, Artificial sequence
  VH
QVQLHQWGAGLLKPSETLSLTCAVSGGSFSDDFWNWIRQPPGKGLEWIGEINHSGTTNYNPSLKSRITMSVDTSKSQFSLKLNSVTAADSAMYFCARGRGNYMFRWFDPWGQGTLVTVSS

SEQ ID NO: 1054 - protein, 123 aa, Artificial sequence
  VH
QVQLQESGPGLVKPSETLSLTCTVSGGSISSYYWSWIRQPPGKGLEWIGYIYYSGSTNYNPSLKSRVTISVDTSKNQFSLKLSSVTAADTAVYYCARGGLWYDSINYYGMDVWGQGTTVTVSS

SEQ ID NO: 1055 - protein, 123 aa, Artificial sequence
  VH
EVQLVQSGAEVKKPGESLKISCKGSGYSFTSYWIGWVRQMPGKGLEWMGIIYPGDSDTRYSPSFQGQVTISADKSISTAYLQWSSLKASDTAMYYCARLILRWPTTWDYFDYWGQGTLVTVSS

SEQ ID NO: 1056 - protein, 116 aa, Artificial sequence
  VH
QVQLVQSGTEVKEPGSSVKVSCKASGDTFSNYPIAWVREAPGQGLEWMGRIIPIVGFANYAQKFQGRVTITADKSTSTAYMELSSLRFEDTAVYYCARVDGPFDYWGQGTLVTVSS

SEQ ID NO: 1057 - protein, 121 aa, Artificial sequence
  VH
QVQLVESGGGVVQPGRSLRLSCAASGFTFSTSAMHWVRQAPGKGLEWVAGISYDGSNEHLDSVKGRFTISRDNSKNTLYLQMSSLRPEDTAVYYCARCPFWNYGHCYLDNWGQGTLVTVSS

SEQ ID NO: 1058 - protein, 121 aa, Artificial sequence
  VH
QVQLVESGGGVVQPGGSLRLSCAASGFTFSTYAMHWLRQAPGRGLEWVAVISYDGSNKYNADSVKGRFTISRDNSKNTLSLHMNSLRPEDTAVYYCARPSVRWYYHAMDVWGQGTTVTVTS

SEQ ID NO: 1059 - protein, 131 aa, Artificial sequence
  VH
EMQLLESGGGLVQPGGSLRLSCAASGFTFFSYALSWVRQAPGKGLEWVSGISGISDSGGNTYYADSVKGRFTISRDNSQNMLYLQMNSLRVEDTAVYYCAKERRPVLRYFDWLPIEAPDYWGPGTLVTVSS

SEQ ID NO: 1060 - protein, 124 aa, Artificial sequence
  VH
EVQLVESGGGLVQPGGSLRLSCAASGFTVSSNYMNWVRQAPGKGLEWVSVIYSGGSTYYADSVKGRFTLSRDNSKNTLYLQMNSLRAEDTAVYYCARGQYDILTGYQYGAFDIWGQGTMVTVSS

SEQ ID NO: 1061 - protein, 121 aa, Artificial sequence
  VH
QVQLQESGPGLVKPSQTLSLTCTVSAGSISSDTYYWSWIRQPAGKGLEWIGRIYTTGSTIYNPSLNSRVLISADTSNNQFSLKLTSVTASDTAVYYCAAHYYSRTDAFHIWGQGTMVTVSS

SEQ ID NO: 1062 - protein, 126 aa, Artificial sequence
  VH
QVQLVQSGAEVKKPGASVKVSCKASGYTFTSYGISWVRQAPGQGLEWMGWISAYNGNTNYAQKLQGRVTMTTDTSTSTAYMELRSLRSDDTAVYYCARDSVSGSGSYYKGLWFDPWGQGTLVTVSS

SEQ ID NO: 1063 - protein, 127 aa, Artificial sequence
  VH
QVQLVQSGAEVKKPGASVKVSCKASGYTFTNYYMHWMRQAPGQGLEWMGIINPSGGSTSYAHQFQGRVTMTRDTSTSTVYMEMSSLRSEDTAVYFCVVGIGYCSSPSCPPLRWFDYWGQGTLVTVSS

SEQ ID NO: 1064 - protein, 124 aa, Artificial sequence
  VH
QVQLVQSGAEVKKPGSSVKVSCKASGGTFSSYTISWVRQAPGQGLEWMGRIIPILGIANYAQKFQGRVTITADKSTSTAYMELSSLRSEDTAVYYCARERGYSGSGSLYYFDYWGQGTLVTVSS

SEQ ID NO: 1065 - protein, 121 aa, Artificial sequence
  VH
QITLKESGPTLVKPTQTLTLTCTFSGFSLSTSGVGVGWIRQPPGKALEWLALIYWDDDKRYSPSLKSRLTITKDTSKNQVVLTMTNMDPVDTATYYCAHYSSSRPPLFDYWGQGTLVTVSS

SEQ ID NO: 1066 - protein, 114 aa, Artificial sequence
  VH
EAQLLESGGGLVQPGGSLRLSCAVSGFTVSSYDMSWVRQAPGKRLEWVSFISARGSVTYYADSVRGRFTISRDNFKNTLYVEMNNLRVEDTAVYYCAKGHWSTWGQGTLVTVSS

SEQ ID NO: 1067 - protein, 125 aa, Artificial sequence
  VH
QVQLVESGGGVVQPGRSLRLSCAASGFTFRNYGMHWVRQAPGKGLEWVAVISYDGSNKYYADSVKGRFTISRDNSKSTLYLQMNSLRAEDTAVYYCANGAYYYGSGSYYNGAAYWGQGTLVTVSS

SEQ ID NO: 1068 - protein, 124 aa, Artificial sequence
  VH
QVQLVESGGGVVQPGKSLRLSCAASGFTFSSYGMHWVRQAPGKGLEWVAVISNYGSNKYHADSVKGRITISRDNSKNTLYLQMNSLRAEDTAVYYCAKGGYYDILTGYFPFDYWGQGTLVTVSS

SEQ ID NO: 1069 - protein, 117 aa, Artificial sequence
  VH
EVQLVESGGGLIQPGGSLRLSCAASGFTVSRNYMSWVRQAPGKGLEWVSLIYSGGSTFYADSVKGRFTISRDNSKNTLYLQMNTLRSEDTAVYYCARDLVVYGMDVWGQGTTVTVSS

SEQ ID NO: 1070 - protein, 117 aa, Artificial sequence
  VH
EVQLVESGGGLVQPGGSLRLSCAASGFTVSSNYMSWVRQAPGKGLEWVSVIYSGGSTYYADSVKGRFTISRDNSKNTLYLQMNSLRAEDTAVYYCARDPIRNGMDVWGQGTTVTVSS

SEQ ID NO: 1071 - protein, 117 aa, Artificial sequence
  VH
EVQLVESGGGLVQPGGSLRLSCAASGFTVSRNYMSWVRQAPGKGLEWVSVIYSGGTTHYADSVKGRFTISRHNSKNTLYLQMNSLRAEDTAVYYCARDLVVYGMDVWGQGTTVTVSS

SEQ ID NO: 1072 - protein, 117 aa, Artificial sequence
  VH
EVQLVESGGGLIQPGGSLRLSCAASGLTVSSNYMTWVRQAPGKGLEWVSVIYSGGSTFYADSVKGRFTISRHNSKNTLYLQMNSLRAEDTAVYYCARDAMSYGMDVWGQGTTVTVSS

SEQ ID NO: 1073 - protein, 117 aa, Artificial sequence
  VH
EVQLVESGGGLIQPGGSLRLSCAASGFTVSSNYMSWVRQAPGKGLEWVSVIYSGGSTYYADSVKGRFTISRDNSKNTLYLQMNSLRAEDTAVYYCARDRVVYGMDVWGQGTTVTVSS

SEQ ID NO: 1074 - protein, 117 aa, Artificial sequence
  VH
EVQLVESGGGLIQPGGSLRLSCAASGLIVSSNYMSWVRQAPGKGLEWVSVLYAGGSTDYAGSVKGRFTISRDNSKNTLYLQMNSLRAEDTAVYYCARDAAVYGIDVWGQGTTVTVSS

SEQ ID NO: 1075 - protein, 117 aa, Artificial sequence
  VH
EVQLVESGGGLVQPGGSLRLSCAASGITVRSNYMSWVRQAPGKGLEWVSVIYSGGSTFYADSVKGRFTISRDNSKNTLYLQMNSLRAEDTAVYYCARDLISRGMDVWGQGTTVTVSS

SEQ ID NO: 1076 - protein, 117 aa, Artificial sequence
  VH
EVQLVESGGGLIQPGGSLRLSCAASGFTVSSNYMNWVRQAPGKGLEWVSVIYSGGSTFYADSVKGRFTISRDNSKNTLYLQMNSLRAEDTAVYYCARDRVVYGMDVWGQGTTVTVSS

SEQ ID NO: 1077 - protein, 117 aa, Artificial sequence
  VH
EVQLVESGGGLVQPGGSLRLSCAASGVTVSSNYMSWVRQAPGKGLEWVSVIYSGGSTNYADSVKGRFTISRDNSKNTLYLQMNSLRAEDTAVYYCARDLVSYGMDVWGQGTTVTVSS

SEQ ID NO: 1078 - protein, 117 aa, Artificial sequence
  VH
EVQLVESGGGLIQPGGSLRLSCAASGLTVSSNYMNWVRQAPGKGLEWVSVIYSGGSTYYADSVKGRFTISRDNSKNMVYLQMNSLRAEDTAVYYCARDLVVYGMDVWGQGTTVIVSS

SEQ ID NO: 1079 - protein, 117 aa, Artificial sequence
  VH
EVQLVESGGGLVQPGGSLRLSCAASGFIVSSNYMTWVRQAPGKGLEWVSVIYSGGSTFYADSVKGRFTISRHNSKNTLFLQMNSLRAEDTAVYYCARDAQNYGMDVWGQGTTVTVSS

SEQ ID NO: 1080 - protein, 116 aa, Artificial sequence
  VH
EVQLVESGGGLVQPGGSLRLSCAASEFIVSRNYMSWVRQAPGKGLEWVSVIYSGGSTFYADSVKGRFTISRDNSKNTLYLQMNSLRAEDTGVYYCARDRGLVSDYWGQGTLVTVSS

SEQ ID NO: 1081 - protein, 107 aa, Artificial sequence
  VL
DIEMTQSPSSLSASVGDRVTITCRASQSIASYAYWYQQKPGKAPKLLISAASILQSGVPSRFSGSGSGGHFTLTINSLQPEDVATYYCQQTYIIPYSFGQGTKLEIK

SEQ ID NO: 1082 - protein, 107 aa, Artificial sequence
  VL
AIRMTQSPSSFSASTGDRVTITCRASQGISSYLAWYQQKPGKAPKLLIYAASTLQSGVPSRFSGSGSGTDFTLTISCLQSEDFATYYCQQYYSYPYTFGQGTKLEIK

SEQ ID NO: 1083 - protein, 110 aa, Artificial sequence
  VL
QSALTQPPSASGSPGQSVTISCTGTSSDVGGYNYVSWYQQHPGKAPKLMIYEVSKRPSGVPDRFSGSKSGNTASLTVSGLQAEDEADYYCSSYAGSNNLVFGGGTKLTVL

SEQ ID NO: 1084 - protein, 106 aa, Artificial sequence
  VL
GIQMTQSPSTLSASVGDRVTITCRASQSISDWLAWYQQKPGKIPKLLIYKASTLESGVPSRFSGSGSGTEFTLTISSLQPDDFGTYYCQRYDSYRTFGQGTKVEIK

SEQ ID NO: 1085 - protein, 107 aa, Artificial sequence
  VL
DIQMTQSPSSLSASVGDRVTITCRASQSISSYLNWYQQKPGKSPKLLIYAASTLQSGVPSRFSGSGSGTDFTLTISSLQPEDFATYYCQQSYSTPYTFGQGTKLEIK

SEQ ID NO: 1086 - protein, 107 aa, Artificial sequence
  VL
DIQMTQSPSSLSASVGDRVTITCQASQDISNYLNWYQQKPGKAPKVLIYDASNLKTGVPSRFSGSGSGTDFTFTISSLQPEDIATYYCQQYDNLPLTFGQGTRLEIK

SEQ ID NO: 1087 - protein, 108 aa, Artificial sequence
  VL
EIVLTQSPGTLSLSPGERATLSCRASQSVSSSYLAWYQQKPGQAPRLLIYGASHRASGIPDRFSGSGSGTDFTLTISRLEPGDFAMYYCQQYATSPWTFGQGTTVEIK

SEQ ID NO: 1088 - protein, 110 aa, Artificial sequence
  VL
QSVLAQPPSASGTPGQSVTISCSGNNSNIGINNVYWYQQFPGTAPKLLIHRSNQRPSGVPDRFSGSRSGTSASLVISGLRSEDEAEYHCAAWDDSLSSWGFGGGTKLTVL

SEQ ID NO: 1089 - protein, 111 aa, Artificial sequence
  VL
QLVLTQSPSASASLGASVKLTCTLSSGHSSYAIAWHQQQPEKGPRYLMKLSSDGSHRKGDGIPDRFSGSSSGAERYLTISSLQSEDEADYYCQTWGTGTVVFGGGTKLTVL

SEQ ID NO: 1090 - protein, 107 aa, Artificial sequence
  VL
SYELTQPPSVSVSPGQTARITCSGDALPKQYAYWYQQKPGQAPVLVIYKDSERPSGIPERFSGSSSGTTVTLTISGVQAEDEADYYCQSADSSGTWVFGGGTKLTVL

SEQ ID NO: 1091 - protein, 107 aa, Artificial sequence
  VL
EIVLTQSPATLSLSPGERATLSCRASQSISSYLAWYQQKPGQAPRLLIYEAANRATGIADRFSGSGSGTDFTLTISSLEPEDFAIYYCQQRSDWTPTFGQGTKVEIK

SEQ ID NO: 1092 - protein, 107 aa, Artificial sequence
  VL
AIQLTQSPSSLSASVGDRVTITCRASQGISSALAWYQQKPGKAPKLLIYDASSLESGVPSRFSGSGSGTDFTLTISSLQPEDFATYYCQQFNSYPRTFGGGTKVEIK

SEQ ID NO: 1093 - protein, 109 aa, Artificial sequence
  VL
QSALTQPASVSGSPGQSITISCTATSSDFGTFHLVSWYQQHPGKAPQLMIYEVNKRPSGVSDRFSASKSGNTASLTISGLQPEDEADYYCCSYAGNTTFFGGGTKLTVL

SEQ ID NO: 1094 - protein, 110 aa, Artificial sequence
  VL
QAVLTQPPSVSAAPGQRVSISCSGSAFNIGTNFVSWYQHLPGAAPKLLIYGDQWRISGTPDRFSGSKSGTSATLAITGLQSGDEAHYYCSTWDASLKEVLFGGGTRLDVL

SEQ ID NO: 1095 - protein, 112 aa, Artificial sequence
  VL
DVVMTQSPLSLPVTLGQPASISCRSSQSLVYYDGNTYLNWFQQRPGQSPRRLIYKVSNRDSGVPDRFSGSGSGTDFTLKISRVEAEDVGVYYCMQGTHWPLTFGPGTKVDIK

SEQ ID NO: 1096 - protein, 107 aa, Artificial sequence
  VL
DIQMTQSPSTLSASVGDSVTITCRPSQSISRWLAWYQQKPGKAPKLLIYKASTLESGVPSRFSGSGSGTEFTLTISSLQPDDFATYYCQQYDSYPWTFGQGTKVEIK

SEQ ID NO: 1097 - protein, 107 aa, Artificial sequence
  VL
DIQLTQSPSFLPASVGDRVTITCRASQHISNYVAWYQQKPGKAPKLLIYAASTLESGVPSRFGGSGSGTEFTLTINSLQPEDFATYYCQQLTTYPRTFGQGTKLEIK

SEQ ID NO: 1098 - protein, 107 aa, Artificial sequence; identical to SEQ ID NO: 1090
  VL

SEQ ID NO: 1099 - protein, 114 aa, Artificial sequence
  VL
DIVMTQSPDSLAVSLGERATINCKSSQSVLYSSNNNKNYLAWYQQKPGQPPKLLIYWASTRESGVPDRFSGSGSGTDFTLTISSLQAEDVAVYFCQQFYSTPVTFGPGTKVDIK

SEQ ID NO: 1100 - protein, 110 aa, Artificial sequence
  VL
NFMLTQPHSLSESPGKTVTISCTGSGASIASNYVQWYQQRPGSAPVTVIFEDTQRPSGVPDRFSGSIDRSSNSASLTISGLRTEDEADYYCQSYDGSNVVFGGGTKLTVL

SEQ ID NO: 1101 - protein, 113 aa, Artificial sequence
  VL
DIVMTQSPDSLAVSLGERATINCKSSQSVLYSSNNKNYLAWYQQKPGQPPKLLIYWASTRESGVPDRFSGSGSGTDFTLTISSLQAEDVAVYYCQQYYSTPLTFGGGTKVEIK

SEQ ID NO: 1102 - protein, 114 aa, Artificial sequence
  VL
DIVMIQSPDSLAVSLGERATINCKSSHSVFFSKVNKDYLAWYQQKPGLPPKLLIYWASTRQTGVPDRFSGSGSGTDFSLTISNLQAEDVAVYYCQQYYDTPMYTFGQGTKLEIK

SEQ ID NO: 1103 - protein, 107 aa, Artificial sequence
  VL
DIQMTQSPSTLSASVGDRVTITCRASQSISSWLAWYQQKPGKAPKLLIYKASSLESGVPSRFSGSGSGTEFTLTISSLQPDDFATYYCQQYNSYPYTFGQGTKLEIK

SEQ ID NO: 1104 - protein, 110 aa, Artificial sequence
  VL
QSALTQPASVSGSPGQSITISCTGTSSDVGGYNYVSWYQQHPGKAPKLMIYDVSKRPSGVSNRFSGSKSGNTASLTISGLQAEDEADYYCSSYTSSSTFVFGTGTKVTVL

SEQ ID NO: 1105 - protein, 110 aa, Artificial sequence
  VL
SYELTQPPSVSVSPGQTARITCSGDALPKQYAYWYQQKPGQAPVLVIYKDSERPSGIPERFSGSSSGTTVTLTISGVQAEDEADYYCQSADSSGTYSNWVFGGGTKLTVL

SEQ ID NO: 1106 - protein, 110 aa, Artificial sequence
  VL
QSALTQPASVSGSPGQSITISCTGTSSDVGGYNYVSWYQQHPGKAPKLMIYDVSNRPSGVSNRFSGSKSGNTASLTISGLQAEDEADYYCSSYTSSSTVVFGGGTKLTVL

SEQ ID NO: 1107 - protein, 108 aa, Artificial sequence
  VL
EIVLTQSPGTLSLSPGERATLSCRASQSVSSSYLAWYQQKPGQAPRLLIYGASSRATGIPDRFSGSGSGTDFTLTISRLEPEDFAVYYCQQYGSSPLTFGGGTKVEIK

SEQ ID NO: 1108 - protein, 108 aa, Artificial sequence; identical to SEQ ID NO: 1107
  VL

SEQ ID NO: 1109 - protein, 103 aa, Artificial sequence
  VL
DFQMTQSPSSLSASVGDRVTISCQASEDIDNHLNWYQQKPGKAPRLLIYDASNLETGVPSRFSGSGSGTDFLFTITSLQPEDFATYYCQQYGAFGQGTKVEIK

SEQ ID NO: 1110 - protein, 108 aa, Artificial sequence
  VL
EIVLTQSPGTLSLSPGERATLSCRASQSVSSSYLAWYQQKPGQAPRLLIYGASSRATGIPDRFSGSGSGTDFTLTISRLEPEDFAVYYCQQYGSSPWTFGQGTKVEIK

SEQ ID NO: 1111 - protein, 110 aa, Artificial sequence
  VL
QSVLTQPPSASGTPGQRVTISCSGSRSNIGSKNVHWYQQLPGTAPKFLIYSNNQRPSGVPDRFSGSKSGTSASLAISGLQSEDEADYYCAVWDDSLNGVVFGGGTKLTVL

SEQ ID NO: 1112 - protein, 111 aa, Artificial sequence
  VL
QSALTQPPSASGSPGQSVTISCTGTSSDVGSYHYVSWYQQHPGKAPKLIIYEVSKRPSGVPDRFSGSKSGNTASLTVSGLQTDDEADYYCSSFAGSNNPYVFGTGTKVTVL

SEQ ID NO: 1113 - protein, 113 aa, Artificial sequence
  VL
DIVMTQSPDSLAVSLGERATINCRSSQSVLYSANNKYYLAWYQHKPGQPPKLLIHWASTRESGVPDRFSGSGSGTDFTLTISSLQAEDVAIYYCQQYYSTPYTFGQGTKLEIK

SEQ ID NO: 1114 - protein, 107 aa, Artificial sequence
  VL
EIVMTQSPATLSVSPGERATLSCRASQSVKSYLAWYQQKAGQAPRLLIYGASSRATGIPARFSGSRSGTEFTLTISSLQSEDFAVYFCHQYDSWPPTFGGGTKVEIK

SEQ ID NO: 1115 - protein, 109 aa, Artificial sequence
  VL
DVVLTQSPATLSLSPGERATLSCRASKDINSYLAWYQQKPGQAPRLLIYDASKRATGVPVRFSGSGSGTDFTLTISSLEPEDSAIYFCQNRDDWPPLFTFGPGTKVDFK

SEQ ID NO: 1116 - protein, 113 aa, Artificial sequence
  VL
DIVMTQSPDSLAVSLGERATINCKSSQSVLYSSNNKNYLAWYQQKPGQPPKLLIYWASTRESGVPDRFSGSGSGTDFTLTISSLQAEDVAVYYCQQYYSTPRTFGQGTKLEIK

SEQ ID NO: 1117 - protein, 108 aa, Artificial sequence
  VL
DMQMTQSPSSVSASVGDRVTITCRASQDISSSLAWYQQKPGKPPKLLIYAASSLQRGVPSRFSGSGSGTDFTLTISSLQPEDFATYYCQQAHSFLSLTFGGGTKVEIK

SEQ ID NO: 1118 - protein, 109 aa, Artificial sequence
  VL
SCELTQPPSVSVSPGQTARITCSGDALSNQYTYWYQQRPGQAPLLVIYKGTKRPSAIPERFSGSRSGTTVTLTISGVQAEDEADYYCQSADTSGTYLWVFGGGTKLTVL

SEQ ID NO: 1119 - protein, 107 aa, Artificial sequence
  VL
DIQMTQSPSSLSASVGDRVTITCQASQDISNFLNWYQQKPGKAPELLIYDASNLETGVPSRISGSGSGTDFTFTISSLQPEDIATYYCQQYDSLPITFGQGTRLEIK

SEQ ID NO: 1120 - protein, 106 aa, Artificial sequence
  VL
DIQMTQSPSSLSAVLGDRVTITCRASQAISNSLAWYQQKPGKAPKLLLYAASRLESGVPSRFSGSGSGTDYTLTISSLRPEDFATYYCQQYYGIPTFGQGTRLENK

SEQ ID NO: 1121 - protein, 107 aa, Artificial sequence
  VL
DVQMTQSPSSLSASVGDRVTITCQASRDIHNLLNWYQQKPGKAPKLLIYDASNLETGVPSRFSGSGSGTDFTFTITGLQPEDVATYYCQKCDNFPWTFGQGTKVEIK

SEQ ID NO: 1122 - protein, 110 aa, Artificial sequence
  VL
QSVLTQSPSASGTPGQRVTISCSGSNSNIGSNYVFWYHQLPGTTPKLLIYKNNQRPSGVPDRFSGSKSGTSASLAISGLRSEDEADYYCAAWDDSLSVVVFGGGTKLTVL

SEQ ID NO: 1123 - protein, 108 aa, Artificial sequence
  VL
DIHMTQSPSSLSASEGDRVTISCRASQGISTNYLNWYQQKSGKAPRLLIYATSTLQSGVSSRFSGSGSGTDFTLTINSVQPEDFATYYCQQSYSSPPTFGGGTKLDIK

SEQ ID NO: 1124 - protein, 105 aa, Artificial sequence
  VL
QSVLTQPPSVSGAPGQRVTISCTGIGARYNVHWYQQVPGTAPKLLIYRNTNRPSGVPDRFSGSKSDTSASLAITGLQAEDEADYYCQSYDDTLTIFGGGTKLTVL

SEQ ID NO: 1125 - protein, 107 aa, Artificial sequence
  VL
DIQMTQSPSSLSASVGDRVTITCRASQSISNHFNWYQHRPQKAPKLLIYSASNLQSGVPSRFSGSGSGRNFTLTISSLQPEDFATYYCQQSYGAPPTFGGGTKVEIK

SEQ ID NO: 1126 - protein, 108 aa, Artificial sequence
  VL
DIQMTQSPSSLSASEGDRVTITCRANQSISTNYLNWYQQQSGKAPKLLIYASSTLQSGVPTRFSGSGSGTDFALTINSLQPEDFAAYYCQQSYSTPPTFGGGTRVDLR

SEQ ID NO: 1127 - protein, 108 aa, Artificial sequence
  VL
DIQMTQSPSSLSASEGDRVTILCRASQSISTNYLNWYQQKSGKAPKLLIYSTSNLQSGVPSRFSGSGSGTDFTLTIDSLQGEDFATYYCQQSFSTPPTFGGGTKVDIK

SEQ ID NO: 1128 - protein, 113 aa, Artificial sequence
  VL
DIQMTQSPSSLSASEGDRVTITCRANQSISTNYLNWYQQKSGKAPNLLIYATSSLERGVPSRFSGSGSGTEFSLTINSLQPEDFVTYYCQQSYSSPPTFGGGTKVEIKRMEIK

SEQ ID NO: 1129 - protein, 108 aa, Artificial sequence
  VL
SYELTQPPSVSVSPGQTARITCSGDALPKKYAYWYQQKSGQAPVLVIYEDSKRPSGIPERFSGSSSGTMATLTISGAQVEDEADYYCYSTDSSGNHWVFGGGTKLTVL

SEQ ID NO: 1130 - protein, 109 aa, Artificial sequence
  VL
QAVVTQEPSLTVSPGGTVTLTCGSSTGAVTSGHYPYWFQQKPGQGPRTLIYDINNKYSWTPARFSGSLLGGKAALTLFGAQPEDEADYYCLLSYSGVRIFGGGTKLTVL

SEQ ID NO: 1131 - protein, 110 aa, Artificial sequence
  VL
QSVLTQPPSVSGAPGQRVTISCTGSSSNIGAGYDVHWYQQLPGTAPKLLIYGNSNRPSGVPDRFSGSKSGTSASLAITGLQAEDEADYYCQSYDSSLSKVFGGGTKLTVL

SEQ ID NO: 1132 - protein, 107 aa, Artificial sequence
  VL
SYELTQPPSVSVSPGQTASITCSGDKLGDKYACWYQQKPGQSPVLVIYQDSKRPSGIPERFSGSNSGNTATLTISGTQAMDEADYYCQAWDSSTFYVFGTGTKVTVL

SEQ ID NO: 1133 - protein, 110 aa, Artificial sequence
  VL
QSVLTQPPSVSAAPGQKVTISCSGSSSNIGNNYVSWYQQLPGTAPKLLIYDNNKRPSGIPDRFSGSKSGTSATLGITGLQTGDEADYYCGTWDSSLSAVVFGGGTKLTVL

SEQ ID NO: 1134 - protein, 107 aa, Artificial sequence
  VL
EIVMTQSPATLSVSPGERATLSCRASQSVSSNLAWYQQKPGQAPRLLIYGASTRATGIPARFSGSGSGTEFTLTISSLQSEDFAVYYCQQYNNWPWTFGQGTKVEIK

SEQ ID NO: 1135 - protein, 110 aa, Artificial sequence
  VL
QAVVTQEPSLTVSPGGTVTLTCGSSTGAVTSGHYPYWFQQKPGQAPRTLIYDTSNKHSWTPARFSGSLLGGKAALTLSGAQPEDEAEYYCLLSYSGARPVFGGGTKLTVL

SEQ ID NO: 1136 - protein, 108 aa, Artificial sequence
  VL
DIQMTQSPSSLSASVGDRVTITCRASQSISSYLNWYQQKPGKAPKLLIYAASSLQSGVPSRFSGSGSGTDFTLTISSLQPEDFATYYCQQSYSTPPYTFGQGTKLEIK

SEQ ID NO: 1137 - protein, 111 aa, Artificial sequence
  VL
QSALTQPASVSGSPGQSITISCTGTSSDVGGYNYVSWYQQHPGKAPKLMIYDVSKRPSGVSNRFSGSKSGNTASLTISGLQAEDEADYYCSSYTSSSTRVVFGGGTKLTVL

SEQ ID NO: 1138 - protein, 113 aa, Artificial sequence
  VL
DIVMTQSPDSLAVSLGERATINCKSSQSVLYSSNNKNYLAWYQQKPGQPPKLLIYWASTRESGVPDRFSGSGSGTDFTLTISSLQAEDVAVYYCQQYYSTPITFGQGTRLEIK

SEQ ID NO: 1139 - protein, 108 aa, Artificial sequence; identical to SEQ ID NO: 1107
  VL

SEQ ID NO: 1140 - protein, 110 aa, Artificial sequence
  VL
QSVLTQPPSVSAAPGQKVTISCSGSSSNIGNNYVSWYQQLPGTAPKLLIYDNNKRPSGIPDRFSGSKSGTSATLGITGLQTGDEADYYCGTWDSSLSVVVFGGGTKLTVL

SEQ ID NO: 1141 - protein, 111 aa, Artificial sequence
  VL
QSALTQPASVSGSPGQSITISCTGTSSDVGGYNYVSWYQQHPGKAPKLMIYDVSKRPSGVSNRFSGSKSGNTASLTISGLQAEDEADYYCSSYTSSSTFAVFGGGTQLTVL

SEQ ID NO: 1142 - protein, 112 aa, Artificial sequence
  VL
DIVMTQSPLSLPVTPGEPASISCRSSQSLLHSNGYNYLDWYLQKPGQSPQLLIYLGSNRASGVPDRFSGSGSGTDFTLKISRVEAEDVGVYYCMQALQTPLTFGGGTKVEIK

SEQ ID NO: 1143 - protein, 112 aa, Artificial sequence
  VL
DIVMTQSPLSLPVTPGEPASISCRSSQSLLHSNGYNYLDWYLQKPGQSPQLLIYLGSNRASGVPDRFSGSGSGTDFTLKISRVEAEDVGVYYCMQALQTVFTFGPGTKVDIK

SEQ ID NO: 1144 - protein, 112 aa, Artificial sequence; identical to SEQ ID NO: 1143
  VL

SEQ ID NO: 1145 - protein, 107 aa, Artificial sequence; identical to SEQ ID NO: 1081
  VL

SEQ ID NO: 1146 - protein, 107 aa, Artificial sequence; identical to SEQ ID NO: 1082
  VL

SEQ ID NO: 1147 - protein, 108 aa, Artificial sequence
  VL
SYVLTQPPSVSVAPGKTARITCGGNNIGSKSVHWYQQKPGQAPVLVIYYDSDRPSGIPERFSGSNSGNTATLTISRVEAGDEADYYCQVWDSSSDHVVFGGGTKLTVL

SEQ ID NO: 1148 - protein, 108 aa, Artificial sequence
  VL
SYELTQPPSVSVSPGQTASITCSRDKLGDEYACWYQQKPGQSPILVIYQNNKRPAGIPERFSGSNSGNTATLTISGTQAMDEADYYCQAWDSSTSYVVFGGGTKLTVL

SEQ ID NO: 1149 - protein, 110 aa, Artificial sequence
  VL
QSVLTQPPSVSAAPGQKVTISCSGSSSNIGNNYVSWYQQLPGTAPKLLIYDNNKRLSGIPDRFSGSKSGTSATLDITGLQTGDEADYYCGTWDSSLSVGVFGGGTKLTVL

SEQ ID NO: 1150 - protein, 110 aa, Artificial sequence
  VL
QSALTQPASVSGSPGQSITISCTGTSSDVGGYNYVSWYQQHPGKAPKLMIYDVSKRPSGVSNRFSGSKSGNTASLTISGLQAEDEADYYCNSYTSNSTAVFGGGTKLTVL

SEQ ID NO: 1151 - protein, 107 aa, Artificial sequence
  VL
EVVLTQSPATLSASPGERATLSCRASLSINTDLAWYQQRPGQPPRLLIYGASTRATGIPARFSGSGSGTEFTLTVSSLQSEDFALYYCQQSYNWPRTFGQGTRVEIK

SEQ ID NO: 1152 - protein, 107 aa, Artificial sequence
  VL
DIQMTQSPSAMSASVGDRVTITCRASQGMSNYLAWFQQKPGKVPKRLIYAASSLASGVPSRFSGSGSGTEFTLTISSLQPEDFATYYCLQHNSYPYTFGQGTKLEIK

SEQ ID NO: 1153 - protein, 107 aa, Artificial sequence
  VL
DIQMTQSPSTLSAPVGDRVTITCRASQSINSWLAWYQQKPGKAPKLLIYKASNLESGVSSRFSGSGSGTEFTLTISSLQPDDFATYYCQQYNGYPHTFGQGTKLEIK

SEQ ID NO: 1154 - protein, 106 aa, Artificial sequence
  VL
DIQMTQSPSTLSASVGDRVTITCRASQSISSWLAWYQQKPGKAPKLLIYKASNLESGVPSRFSGSGSGTDFTLTISSLQPDDFATYYCQQYSYYSAFGQGTQVEFK

SEQ ID NO: 1155 - protein, 104 aa, Artificial sequence
  VL
EIVLTQSPGTLSLSPGERASLSCRASQTVSSTYLAWYQQKPGQAPRLLIYGASSRATGIPDRFSGSGSGTDFTLTITRLEPEDFAVYYCQQYGTFGQGTKLEIK

SEQ ID NO: 1156 - protein, 110 aa, Artificial sequence
  VL
QAGLTQPPSVSKGLRQTATLTCTGTSSNVGNQGAAWLQQHQGHPPKLLSYRNDNRPSGISERLSASRSGNTASLTITGLQPEDEADYYCSAWDSSLSAWVFGGGTKLTVL

SEQ ID NO: 1157 - protein, 113 aa, Artificial sequence
  VL
DIVMTQSPDSLAVSLGERATINCKSSQSVLYNSNNKDYLAWYQQKPGQPPKLLFSWASTRQSGVPARFSGGGSGTDFTLTISSLQAEDVAVYYCQQYYSTPITFGGGTKVEIK

SEQ ID NO: 1158 - protein, 110 aa, Artificial sequence
  VL
DFVLTQPHSVSESPGKTVTISCTRSSGSIASYFVHWYQQRPGSAPTTVIYEDNQRPSGVPDRFSGSIDSSSNSASLIISGLKTEDEADYYCQSFDDNDQVFGGGTKLTVL

SEQ ID NO: 1159 - protein, 110 aa, Artificial sequence
  VL
QTVVTQEPSFSVSPGGTVTLTCGLTSGSVSTTYYPSWYQQTPGQPPRTLIYSTNIRSSGVPDRFSGSILGNKAALTITGAQADDESNYYCLLYVGGGIWVFGGGTKLTVL

SEQ ID NO: 1160 - protein, 106 aa, Artificial sequence
  VL
EIVMTQSPATLAVSPGERATLSCRASQSVSDNLAWYQQRPGQPPRLLIYAASTRATGIPPRFSGSGSGTEFTLTIASLQSEDFALYYCQQYNIWLTFGGGTKVEIK

SEQ ID NO: 1161 - protein, 111 aa, Artificial sequence
  VL
AVVMTQSPLSLPVTLGQPASISCRSSQSLVHSDGNTYLNWFQQRPGQSPRRLIYKVSDRDSGVPDRFSGSGSGTDFTLKINRVEAEDVGVYYCMQGTLLLTFGGGTKVEIK

SEQ ID NO: 1162 - protein, 110 aa, Artificial sequence
  VL
QSVLTQPPSVSAAPGQKVTISCSGSSSNIGNNYVSWYQQLPGTAPKLLIYDNNKRPSGVPDRFSGSKSGTSATLGITGLQTGDEADYYCETWDSSLDAVIFGGGTKLTVL

SEQ ID NO: 1163 - protein, 110 aa, Artificial sequence
  VL
QSVLTQPPSASGTPGQRVTISCSGSSSNIGSNYVYWYQQLPGTAPKVLIYRNNQRPSGVPDRFSGSKSGTSASLAISGLRSEDEADYYCAAWDDSLSGRVFGGGTKLTVL

SEQ ID NO: 1164 - protein, 113 aa, Artificial sequence
  VL
DVVVTQSPLSLSVTLGQPASISCRSSQSLVHSDGNTYLNWFQQRPGQSPRRLIYKVSNRDSGVPDRFSGSGSGTDFTLKISRVEADDVGVYYCMQGTHWPHPTFGQGTRVEIK

SEQ ID NO: 1165 - protein, 111 aa, Artificial sequence
  VL
AVVVTQSPLSLPVTLGQPASISCRSSQSLVYSDGNTYLNWFQQRPGQSPRRLIYKVSNRDSGVPDRFSGSGSGTDFTLQISKVEAEDVGVYYCMQGTPWPTFGQGTKVEIK

SEQ ID NO: 1166 - protein, 107 aa, Artificial sequence
  VL
EIVLTQSPGTLSLSPGERATLSCRASQSVRSNYLAWYQLKPGQAPRLLIYGASSRATGIPDRFSGSGSGTDFTLTISRLEPEDFAVYYCQQSGSSYTFGQGTKLEIK

SEQ ID NO: 1167 - protein, 112 aa, Artificial sequence
  VL
AIVMTQSPLSLPVTPGEPASISCRSSQSLRQSQRFSYLDWYVQKPGQSPQLLIYLNSRRAPGVPDRFSASGSGTDFTLKISRVEAEDVGVYYCMQSLPSGFTFGPGTNVHIK

SEQ ID NO: 1168 - protein, 112 aa, Artificial sequence
  VL
DIVMTQAPLSLSVTPGQPASISCKSSQSLLHSIGKTHLYWYLQKPGQPPQLLIYEVSNRFSGVPERVSGSGSGTDFTLTISRVEAEDVGVYYCMQSLDLPPTFGQGTKVDIK

SEQ ID NO: 1169 - protein, 107 aa, Artificial sequence
  VL
DIQMTQSPSFVSASVGDRVTITCRASHDIRTWLSWYQQKPGKAPKLLIYTAFRLQSGVPSRFSGSGSGTDFTLTISSLQPEDFATYFCQQGSSFPLTFGGGTTVDIR

SEQ ID NO: 1170 - protein, 107 aa, Artificial sequence
  VL
DIQMTQSPSSLSASVGDSVTVTCRASQDIGNWLAWYQLKPEKAPRSLIFAASILRSGVPSRFSGSGSGTEFTLTISSLQPEDFGVFYCQQYDSSPITFGQGTRLEIK

SEQ ID NO: 1171 - protein, 110 aa, Artificial sequence
  VL
SSQLTQDPAVSVALGQTVRITCQGDSLETYYATWYQQKPGQAPLLVIYGKNSRPSGIPDRFSGSSSGNTASLTITGAQAEDEADYYCNSRDSSGQLHVVVFGGGTKLTVL

SEQ ID NO: 1172 - protein, 108 aa, Artificial sequence
  VL
SSELTQDPAVSVALGQTVRITCQGDSLRTSYASWYQQKPGQAPMLVIYEKNNRPSGVPDRFSGSTSFNTASLTITGAQAEDEAEYYCNSRDNNDDLPLFGGGTRLTVL

SEQ ID NO: 1173 - protein, 111 aa, Artificial sequence
  VL
QSALTQPPSASGSPGQSVTISCTGTSSDVGGYNYVSWYQQHPGKAPKLMIYEVSKRPSGVPDRFSGSKSGNTASLTVSGLQAEDEADYYCSSYAGSNNLGVFGTGTKVTVL

SEQ ID NO: 1174 - protein, 111 aa, Artificial sequence
  VL
QSVLTQPPSVSGAPGQRVTISCTGSSSNIGAGYDVHWYQQLPGTAPKLLIYGNSNRPSGVPDRFSGSKSGTSASLAITGLQAEDEADYYCQSYDSSLSGVVFGGGTKLTVL

SEQ ID NO: 1175 - protein, 113 aa, Artificial sequence
  VL
DIVMTQSPDSLAVSLGERATINCKSSQSVLYSSNNKNYLAWYQQKPGQPPKLLIYWASTRESGVPDRFSGSGSGTDFTLTISSLQAEDVAVYYCQQYYSTPFTFGPGTKVDIK

SEQ ID NO: 1176 - protein, 112 aa, Artificial sequence
  VL
DVVMTQSPLSLPVTLGQPASISCRSSQSLVHSDGNTYLNWFQQRPGQSPRRLIYKVSNRDSGVPDRFSGSGSGTDFTLKISRVEAEDVGVYYCMQGTHWPITFGQGTRLEIK

SEQ ID NO: 1177 - protein, 111 aa, Artificial sequence
  VL
QSALTQPASVSGSPGQSITISCTGTSSDVGGYNYVSWYQQHPGKAPKLMIYDVSKRPSGVSNRFSGSKSGNTASLTISGLQAEDEADYYCSSYTSSSTLVVFGGGTKLTVL

SEQ ID NO: 1178 - protein, 107 aa, Artificial sequence
  VL
DIQMTQSPSSLSASVGDRVTITCRASQSISSYLNWYQQKPGKAPKLLIYAASSLQSGVPSRFSGSGSGTDFTLTISSLQPEDFATYYCQQSYSTPYTFGQGTKLEIK

SEQ ID NO: 1179 - protein, 109 aa, Artificial sequence
  VL
QSALTQPRSVSGSPGQSVTISCTGTSSDVGGYNYVSWYQQHPGKAPKLMIYDVSKRPSGVPDRFSGSKSGNTASLTISGLQAEDEADYYCCSYAGSYVVFGGGTKLTVL

SEQ ID NO: 1180 - protein, 107 aa, Artificial sequence
  VL
DIQMTQSPSSLSASVGDRVTITCRASQSISSYLNWYQQKPGKAPKLLIYAASSLQSGVPSRFSGSGSGTDFTLTISSLQPEDFATYYCQQSYSTLHTFGQGTKVEIK

SEQ ID NO: 1181 - protein, 108 aa, Artificial sequence
  VL
SSELTQDPAVSVALGQTVRITCQGDSLRSYYASWYQQKPGQAPVLVIYGKNNRPSGIPDRFSGSSSGNTASLTITGAQAEDEADYYCNSRDSSGNHLVFGGGTKLTVL

SEQ ID NO: 1182 - protein, 108 aa, Artificial sequence
  VL
SYELTQPPSVSVSPGQTATITCSGDELGDTDIAWYQQKPGQSPVLVILQDTKRPSGIPERFSGSNSGTTATLTIGGTQAMDEAEYYCQAWDTITHEEVFGGGTKLTVL

SEQ ID NO: 1183 - protein, 107 aa, Artificial sequence
  VL
DIQMTQSPSTLSASVGDRVTITCRASQSISSWLAWYQQKPGKAPKLLIYKASSLESGVPSRFSGSGSGTEFTLTISSLQPDDFATYYCQQYNYYPVAFGQGTKVEIK

SEQ ID NO: 1184 - protein, 112 aa, Artificial sequence
  VL
DIVMTQTPLSSPVTLGQPASISCRSSQSLVHSDGNTYLSWLQQRPGQPPRLLIYKISNRFSGVPDRFSGSGAGTDFTLKISRVEAEDVGVYYCTQATQFPLTFGGGTKVEIK

SEQ ID NO: 1185 - protein, 108 aa, Artificial sequence
  VL
DIQMTQSPSSLSASVGDRVTITCRASQSISSYLNWYQQKPGKAPKLLIYAASSLQSGVPSRFSGSGSGTDFTLTISSLQPEDLATYYCQQSYSTPPYTFGQGTKLEIK

SEQ ID NO: 1186 - protein, 112 aa, Artificial sequence
  VL
QSVLTQPPSVSGAPGQRVTISCTGSSSNIGAGYDVHWYQQLPGIAPKLLIYGNNNRPSGVPDRFSGSKSGTSASLAITGLQAEDEADYYCQSYDSSLSSPVVFGGGTKLTVL

SEQ ID NO: 1187 - protein, 110 aa, Artificial sequence
  VL
QSVLTQPPSASGTPGQRVTISCSGSSSNIGSNYVYWYQQLPGTAPKLLIYRNNQRPSGVPDRFSGSKSGTSASLAISGLRSEDEADYYCAAWDDSLSGPVFGGGTKLTVL

SEQ ID NO: 1188 - protein, 108 aa, Artificial sequence; identical to SEQ ID NO: 1181
  VL

SEQ ID NO: 1189 - protein, 107 aa, Artificial sequence
  VL
DIQMTQSPSSLSASVGDRVTITCQASQDISNYLNWYQQKPGKAPKLLIYDASNLETGVPSRFSGSGSGTDFTFTISSLQPEDIATYYCQQYDNLPYTFGQGTKLEIK

SEQ ID NO: 1190 - protein, 110 aa, Artificial sequence
  VL
QSVLTQPPSVSAAPGQKVTISCSGSSSNIGNNYVSWYQQLPGTAPKLLIYDNNKRPSGIPDRFSGSKSGTSATLGITGLQTGDEADYYCGTWDSSLSAGVFGGGTKLTVL

SEQ ID NO: 1191 - protein, 108 aa, Artificial sequence
  VL
EIVMTQSPATLSVSPGERATLSCRASQSVSSNLAWYQQKPGQAPRLLIYGASTRATGIPARFSGSGSGTEFTLTISSLQSEDFAVYYCQQYNNWPPWTFGQGTKVEIK

SEQ ID NO: 1192 - protein, 107 aa, Artificial sequence
  VL
SYELTQPPSVSVSPGQTASITCSGDKLGDKYACWYQQKPGQSPVLVIYQDSKRPSGIPERFSGSNSGNTATLTISGTQAMDEADYYCQAWDSSTYVVFGGGTKLTVL

SEQ ID NO: 1193 - protein, 108 aa, Artificial sequence
  VL
DIQMTQSPSSLSASEGDRVTITCRASQSISTNYLNWYQQKSGRAPTLLIYATSTLQSGVPSRFSGSGSGTDFTLTISSLQPEDFATYYCQQSYSSPPTFGGGTTVDVK

SEQ ID NO: 1194 - protein, 108 aa, Artificial sequence
  VL
DIQMTQSPSSVYASEGDRVTITCRASHSISTNYLNWYQQNSGKAPKLLIYATSSLQSGVPFRFSGSGSGTDFTLTISSLQPEDFATYYCQQSYSSPPTFGGGTKVEIK

SEQ ID NO: 1195 - protein, 108 aa, Artificial sequence
  VL
DIQMTQSPSSLSASEGDRVTISCRASQTISTNYLNWYQQKSGKAPRLLIYATSTLESGVPSRFSGSGSGTDFTLTINTLQPDDFATYYCQQSYSSPPTFGGGTKVDIK

SEQ ID NO: 1196 - protein, 109 aa, Artificial sequence
  VL
EIVLTQSPATLSLSPGERAALSCRASQTINSGYLAWYQQKPGQAPRLLIYAASHRATGIPNRFSGSGSATDFTLTITRLEPEDVAVYYCHHYGTSPPFTFGPGTKVDIK

SEQ ID NO: 1197 - protein, 108 aa, Artificial sequence; identical to SEQ ID NO: 1107
  VL

SEQ ID NO: 1198 - protein, 108 aa, Artificial sequence
  VL
SYELTQPPSVSVSPGQTARITCSGDALPKQYAYWYQQKPGQAPVLVIYKDSERPSGIPERFSGSSSGTTVTLTISGVQAEDEADYYCQSADSSGTYYVFGTGTKVTVL

SEQ ID NO: 1199 - protein, 107 aa, Artificial sequence
  VL
DIQMTQSPSSLSASVGDRVTITCRASQSISSYLNWYQQKPGKAPKLLIYAASSLQSGVPSRFSGSGSGTDFTLTISSLQPEDFATYYCQQSYSTPRTFGQGTKVEIK

SEQ ID NO: 1200 - protein, 106 aa, Artificial sequence
  VL
SYELTQPPSVSVSPGQTASISCSGDKLGDTYASWYQQKPGQSPVLVMYQDNKRPSGIPERFSGSNSGNTATLTISGTQAMDEADYYCQAWDSSTVVFGGGTKLTVL

SEQ ID NO: 1201 - protein, 112 aa, Artificial sequence
  VL
DIVMTQTPLSLSVTPGQPASISCKSSQSLLHSDGKTYLYWYLQKPGQSPQLLIYEVSNRFSGVPDRFSGSGSGTDFTLKISRVEAEDVGVYYCMQSIQLPLTFGGGTKVEIK

SEQ ID NO: 1202 - protein, 112 aa, Artificial sequence
  VL
DIVMTQTPLSLSVTPGQPASISCKSSQSLLHSDGKTYLYWYLQKPGQSPQLLIYEVSNRFSGVPDRFSGSGSGTDFTLKISRVEAEDVGVYYCMQSIQLPFTFGQGTRLEIK

SEQ ID NO: 1203 - protein, 111 aa, Artificial sequence
  VL
DIVMTQSPLSLPVTPGEPASISCRSSQSLLHSNGYNYLDWYLQKPGQSPQLLIYLGSNRASGVPDRFSGSGSGTDFTLKISRVEAEDVGVYYCMQALQTYTFGQGTKLEIK

SEQ ID NO: 1204 - protein, 109 aa, Artificial sequence
  VL
SYELTQPPSVSVSPGQTARITCSGDALPKKYAYWYQQKSGQAPVLVIYEDSKRPSGIPERFSGSSSGTMATLTISGAQVEDEADYYCYSTDSSGNHRRVFGGGTKLTVL

SEQ ID NO: 1205 - protein, 110 aa, Artificial sequence
  VL
QSALTQPASVSGSPGQSITISCTGTSSDVGGYNYVSWYQQHPGKAPKLMIYDVSKWPSGVSNRFSGSKSGNTASLTISGLQAEDEADYYCSSYTSSSTLVFGGGTKLTVL

SEQ ID NO: 1206 - protein, 109 aa, Artificial sequence
  VL
SYELTQPPSVSVSPGQTARITCSGDALPKKYAYWYQQKSGQAPVLVIYEDSKRPSGIPERFSGSSSGTMATLTISGAQVEDEADYYCYSTDSSGNHRGVFGGGTKLTVL

SEQ ID NO: 1207 - protein, 107 aa, Artificial sequence
  VL
DIQMTQSPDTLSASVGDRVTITCRASESISNWLAWYQKKVGQAPNLLIDKASNLHRGVPSRFSGSGSGTEFTLTITSLQPDDSASYYCQQYNSFPYTFGQGTTLEIK

SEQ ID NO: 1208 - protein, 107 aa, Artificial sequence
  VL
EIVLTQSPATLSLSPGERATLSCRASQSVSSYLAWYQQKPGQAPRLLIYDASNRATGIPARFSGSGSGTDFTLTISSLEPEDFAVYYCQQRSNWPVTFGQGTKVEIK

SEQ ID NO: 1209 - protein, 107 aa, Artificial sequence
  VL
DIQMTQSPSSLSASVGDRVTITCRASQGIRNDLGWYQQKPGKAPKRLIYAASSLQSGVPSRFSGSGSGTEFTLTISSLQPEDFATYYCLQHNSYPLTFGGGTKVEIK

SEQ ID NO: 1210 - protein, 107 aa, Artificial sequence
  VL
DIQMTQSPSSLSASVGDRVTITCRASQGIGNDLGWFQQKPGKAPKRLIYGASNLQSGVPSRFSGSGSGTEFTLTISSLQPEDFATYYCLQHNSYPFTFGGGTKVEIK

SEQ ID NO: 1211 - protein, 108 aa, Artificial sequence
  VL
ETVLTQSPGTLSLSPGERATLSCRASQSVSGSYLAWYQQKPGQAPRLLIYGASRRATGIADRFSGSGSGTDFTLTISRLEPEDFAVYYCQQYGTSAGTFGQGTKVEIK

SEQ ID NO: 1212 - protein, 109 aa, Artificial sequence
  VL
EIVLTQSPGTLSLSPGERGTLSCRASQSVSSSYLAWYQQKPGQAPRLLIYGASTRATGIPDRFSGSGSGTDFTLTISRLEPEDFAVYYCQQYGNLPPFTFGPGTKVDIK

SEQ ID NO: 1213 - protein, 113 aa, Artificial sequence
  VL
DIVVTQSPDSLAVSLGERATINCKSSQSLLYNFNNENYLGWYQQKPGQPPKLLIYWASTRESGVPDRFNGSGSGTDFTLTISSLQAEDVAVYYCQQYYSTPLTFGGGTKVEIK

SEQ ID NO: 1214 - protein, 111 aa, Artificial sequence
  VL
GIVMTQSPLSLSVTPGQPASISCKSSQSLLDSDGKTYMCWYLQKPGQPPQLLIYEVSNRFSGVPERFSGSGSGTDFTLKISRVETEDVGVYYCMQNRHLYTFGQGTKLEIK

SEQ ID NO: 1215 - protein, 111 aa, Artificial sequence
  VL
GIVMTQSPLSLSVTPGQPASISCKSSQSLLDSDGKTYMCWYLQKPGQPPQLLIYEVSNRFSGVPERFSGSGSGTDFTLKISRVEAEDVGVYYCMQNRHLYTFGQGTKLEIK

SEQ ID NO: 1216 - protein, 112 aa, Artificial sequence
  VL
NIVMTQSPLSLPVTPGEPASISCRSSQSLLHSNGYNYLDWYLQKPGQSPQLLIYLGSNRASGVPDRFSGSGSGTDFTLKISRVEAEDVGVYYCMQTLQTSITFGQGTRLEIK

SEQ ID NO: 1217 - protein, 107 aa, Artificial sequence
  VL
EIVLTQSPGTLSLSPGERATLSCRASQSVSTYLAWYQQRPGQAPRLLIYGSSSRAAGIPDRFSGSGSGTDFTLTISRLEPEDFAVYYCQQYGSSQYSFGQGTKLEIK

SEQ ID NO: 1218 - protein, 107 aa, Artificial sequence
  VL
EIVLTQSPGTLSLSPGERATLSCRASQSVSSYLAWYQQRPGQAPRLLIYGASSRAAGIPDRFSGSGSGTDFTLTISRLEPEDFAVYYCQQYGSSQYTFGQGTKLEIK

SEQ ID NO: 1219 - protein, 106 aa, Artificial sequence
  VL
DIQMTQSPSSLSASVGDRVTITCQASQDSSKYLNWYQQKPGKAPKLLIYDASTLETGVPSRFSGSGSGTDFTFTISGLQPEDVATYYCQHYDTLLTFGPGTKVEIK

SEQ ID NO: 1220 - protein, 113 aa, Artificial sequence
  VL
DIVMTQSPDSLAVSLGERATINCKSSQSVSFTSNNKNYLAWYQQKPGQPPKLLIYWASTRESGVPDRFSGSGSGTDFTLTISSLQAEDVALYLCQQYFDTPWTFGQGTKVEIK

SEQ ID NO: 1221 - protein, 111 aa, Artificial sequence
  VL
GIVMTQSPLSLSVTPGQPASISCKSSQSLLDSDGKTYLCWYLQKPGQPPQLLIYEVSNRFSGVPERFSGSGSGTDFTLKISRVEAEDVGVYYCMQNRQLYTFGQGTKLEIK

SEQ ID NO: 1222 - protein, 108 aa, Artificial sequence
  VL
DIQMTQSPSSLSASVGDRVTITCQASQDISTYLNWYQQKPGKAPKLLIYDASNLETGVPSRFSGSGSGTDFTFTISSLQPEDIATYYCQQFDNLPPFTFGPGTRVHIT

SEQ ID NO: 1223 - protein, 108 aa, Artificial sequence
  VL
DIQMTQSPSSLSASVGDRVTITCRASQSISNYLNWYQQKPGRAPKVLIYGASTLQSGVPSRFSGSGSGTDFTLTISSLQPEDFATYYCQQSYSARMSTFGQGTKLEIK

SEQ ID NO: 1224 - protein, 112 aa, Artificial sequence
  VL
DVVMTQSPLSLPVTLGQPASISCRSSQSVVHSDGKTYLNWYHQRPGQSPRRLIYEVSNRDSGVPDRFSGSGSGTDFTLKISRVEAEDVGVYYCMQGTQWPWTFGQGTKVEIK

SEQ ID NO: 1225 - protein, 109 aa, Artificial sequence
  VL
EIVLTQSPGTLSLSPGERATLSCRASHTISSSYLAWYQQKAGQAPRLLIYAASSRATGIPARFSGSGSGTDFTLTISRLEPEDFAVYYCQQFDNSPPWTFGRGTKVEMR

SEQ ID NO: 1226 - protein, 108 aa, Artificial sequence
  VL
SYELTQPPSVSVSPGQTARITCSGDALPKQYAYWYQQKPGQAPVLVIYKDSERPSGIPERFSGSSSGTTVTLTISGVQAEDEADYYCQSADSSGTYVVFGGGTKLTVL

SEQ ID NO: 1227 - protein, 110 aa, Artificial sequence
  VL
QSALTQPRSVSGSPGQSVTISCTGTSSDVGGYNYVSWYQQHPGKAPKLMIYDVSKRPSGVPDRFSGSKSGNTASLTISGLQAEDEADYYCCSYAGSYTLVFGGGTKLTVL

SEQ ID NO: 1228 - protein, 107 aa, Artificial sequence
  VL
DIQMTQSPSSLSASVGDRVTITCRASQSISNYLNWYQQKPGKAPKLLIYAASGLQSGVPSRFSGSGSGTDFTLTISSLQPEDFATYYCQQSYSTPFTFGPGTKVDIK

SEQ ID NO: 1229 - protein, 111 aa, Artificial sequence
  VL
DVVMTQSPLSLPVTLGQPASISCRSSQSLVYSDGNTYLNWFQQRPGQSPRRLIYKVSNRDSGVPDRFSGSGSGTDFTLKISRVEAEDVGVYYCMQGTHSYTFGQGTKLEIK

SEQ ID NO: 1230 - protein, 108 aa, Artificial sequence
  VL
SYELTQPPSVSVSPGQTASITCSGDKLGDKYACWYQQKPGQSPVLVIYQDSKRPSGIPERFSGSNSGNTATLTISGTQAMDEADYYCQAWDSSTASYVFGTGTKVTVL

SEQ ID NO: 1231 - protein, 110 aa, Artificial sequence
  VL
QSALTQPASVSGSPGQAITISCTGTSSDVGGHDYVSWYQQHPGKVPKLVVYDVTNRPSGVSNRFSGSKSGNTASLTISGLQAEDEADYYCSSYTSASTVVFGGGTKLTVL

SEQ ID NO: 1232 - protein, 110 aa, Artificial sequence
  VL
QSALTQPASVSGSPGQAITISCTGTSSDVGGHDYVSWYQQHPGKVPKLVVYDVTNRPSGISNRFSGSKSGNTASLTISGLQAEDEADYYCSSYTSASTVVFGGGTKLTVL

SEQ ID NO: 1233 - protein, 112 aa, Artificial sequence
  VL
DVVMTQSPLSLPVTLGQPASISCRSSQSLVYSDGNTYLNWFQQRPGQSPRRLIYKVSNRDSGVPDRFSGSGSGTDFTLKISRVEAEDVGVYYCMQGTHSPWTFGQGTKVEIK

SEQ ID NO: 1234 - protein, 110 aa, Artificial sequence
  VL
QSVLTQPPSVSAAPGQKVTISCSGSSSNIGNNYVSWYQQLPGTAPKLLIYDNNKRPSGIPDRFSGSKSGTSATLGITGLQTGDEADYHCGTWDSSLSAWVFGGGTKLTVL

SEQ ID NO: 1235 - protein, 107 aa, Artificial sequence
  VL
SYELTQPPSVSVSPGQTASITCSGDALPKQYGYWYQQKPGQAPVMVIYKDNERPSGIPERFSGSSSGTTVTLTISGAQAEDEADYYCQSADGRGDWVFGGGTKLTVL

SEQ ID NO: 1236 - protein, 107 aa, Artificial sequence
  VL
EIVLTQSPGTLSLSPGERATLSCRASQSVSTYLAWYQQRPGQAPRLLIYGSSSRAAGIPDRFSGSGSGTDFTLTISRLEPEDFAVYFCQQYGSSQYSFGQGTKLDIK

SEQ ID NO: 1237 - protein, 107 aa, Artificial sequence
  VL
DIQMTQSPSTLSASIGDRVTITCRASQSISSWLAWYQQKPGKAPKLLIYETSSLEPGVPSRFSGSGSGTEFTLTISSLQPDDFATYYCQQYDSYSGTFGQGTKVEIK

SEQ ID NO: 1238 - protein, 111 aa, Artificial sequence
  VL
QPVLTQSSSASASLGSSVKLTCTLSVGHDYFTIAWHQQQPGKAPRFLMKLEGSGSYYKGSGVPDRFSGSSSGADRYLIISNLQSEDEADYFCETWDSPYVVFGGGTKLTVL

SEQ ID NO: 1239 - protein, 106 aa, Artificial sequence
  VL
DIQMTQYPSSLSASVGDTVTITCQASQDSNTYLNWYQQKPGKAPKLLIYDASNLETGVPSRFSGSGSGTDFTFTISGLQPEDIATYYCQHYDSLLTFGPGTKVDIK

SEQ ID NO: 1240 - protein, 110 aa, Artificial sequence
  VL
QSALTQPASVSGSPGQSITISCNGTNSDVGGYNYVSWYQQHPGKAPKLMIYDVSKRPSGVSNRFSGSKSGNTASLTISGLQAEDDADYYCSSYTSSSTVVFGGGTKLTVL

SEQ ID NO: 1241 - protein, 111 aa, Artificial sequence
  VL
DIVMTQSPLSLPVTPGEPASISCRSSQSLLHSNGYNYLDWYLQKPGQSPQLLIYLGSNRASGVPDRFSGSGSGTDFTLKISRVEAEDVGVYYCMQALQTLTFGPGTKVDIK

SEQ ID NO: 1242 - protein, 108 aa, Artificial sequence
  VL
DIQMTQSPSTLSASVGDRVTITCRASQSISSWLAWYQQKPGKAPKLLIYKASSLESGVPSRFSGSGSGTEFTLTISSLQPDDFATYYCQQYNSYPLFTFGPGTKVDIK

SEQ ID NO: 1243 - protein, 112 aa, Artificial sequence
  VL
DVVLTQSPLSLPVTLGQPASISCRSSQSLIYSDGNTYLNWFQQRPGQSPRRLIYKVSNRDSGVPDRFSGSGSGTDFTLRISRVEAEDVGVYYCMQGTHWPMTFGQGTKVEIK

SEQ ID NO: 1244 - protein, 109 aa, Artificial sequence
  VL
EIVLTQSPGTLSLSPGERATLSCRASQSVSSSYLAWYQQKPGQAPRLLIYGASSRATGIPDRFSGSGSGTDFTLTISRLEPEDFAVYYCQQYGSSPMYTFGQGTKLEIK

SEQ ID NO: 1245 - protein, 106 aa, Artificial sequence
  VL
DIQMTQSPSSVSASVGDRVTITCRASQGISSWLAWYQQKPGKAPKLLIYAASSLQSGVPSRFSGSGSGTDFTLTISSLQPEDFATYYCQQANSFPAFGGGTKVEIK

SEQ ID NO: 1246 - protein, 106 aa, Artificial sequence
  VL
SYEVTQSPSVSVSPGQTASITCSGDKLGDKYACWYQQRPGQSPVLVIYQDSKRPSGIPERFSGSNSGNTATLTISGTQAMDEADYYCQAWDSHTVVFGGGTKLTVL

SEQ ID NO: 1247 - protein, 107 aa, Artificial sequence
  VL
DIQMTQSPSTLSASVGDRVTITCRASQSISTWLAWYQQRPGKAPKLLIYKASSLESGVPSRFSGSGSGTEFTLTISSLQPDDFATYYCQQYNSYSWTFGQGTKVEIK

SEQ ID NO: 1248 - protein, 107 aa, Artificial sequence
  VL
ETMMTQSPVALSVSPGDRATLSCEASQYVGDNLAWYQQKPGQAPRLLIYGAFTRATGVPARFSASGSGAGFTLTISSLQSEDFAVYYCQQYTSWPLTFGGGTKVEIK

SEQ ID NO: 1249 - protein, 107 aa, Artificial sequence
  VL
ETMMTQSPVALSVSPGDRATLSCKASQYIGDNLAWYQQKPGQTPRLLIYGASTRATGVPARFSASGSGAGFTLTISSLQSEDFAVYYCQQYTSWPLTFGGGTKVEIK

SEQ ID NO: 1250 - protein, 102 aa, Artificial sequence
  VL
SYELTQPPSVSVSPGQTARITCSGDALPKKYAYWYQQKSGQAPVLVIYEDSKRPSGIPERFSGSSSGTMATLTISGAQVEDEADYYCYSPKVFGGGTKLTVL

SEQ ID NO: 1251 - protein, 107 aa, Artificial sequence
  VL
DIQMTQSPSSLSASVGDRVTVACQASQDVSIYLNWYQQKPGRAPKLLIYDAYNLQTGVPSRFSGSGSGTHFTLTISSLQPEDVATYHCQQYNILPHTFGGGTKVELT

SEQ ID NO: 1252 - protein, 113 aa, Artificial sequence
  VL
DIVMTQSPDSLAVSLGERATIKCKSSQSVYDSSNSKNYLAWFQQKPGQPPQLLIFWASTRESGVPDRFSGSGSGTDFTLTISSLQAEDVAVYYCQQYYNAPLSFGGGTKVEIK

SEQ ID NO: 1253 - protein, 113 aa, Artificial sequence
  VL
DIVMTQSPDSLPVSLGERATIKCKSSQSVYDTSNSKNYLAWFQQKPGQPPQLLIFWASTRESGVPDRFSGSGSGTDFTLTISSLQAEDVAVYYCQQYYNAPLSFGGGTKVEIK

SEQ ID NO: 1254 - protein, 106 aa, Artificial sequence
  VL
EIVLTQSPATLSLSPGERATLSCRASQSVSTYLAWYQQKPGQAPRLLIYDASNRATGIPARFSGSGSGTDFTLTISSLEPEDFAVYYCQQRSNWITFGQGTRLEIK

SEQ ID NO: 1255 - protein, 106 aa, Artificial sequence
  VL
EIVLTQSPATLSLSPGERATLSCRASQSVSSYLAWYQQKPGQAPRLLIYDASNRATGIPARFSGSGSGTDFTLTISSLEPEDFAVYYCQQRSNWITFGQGTRLEIK

SEQ ID NO: 1256 - protein, 110 aa, Artificial sequence
  VL
QSVLTQPPSASGTPGQGVTISCSGGSSNIGAYTVSWYQQLPGTAPKLLIYSTDQRPSGVPDRFSGSKSGTSASLAVTGLQSEDEADYYCAAWDDSLNGPVFGGGTKLTVL

SEQ ID NO: 1257 - protein, 108 aa, Artificial sequence
  VL
EIVLTQSPGTLSLSPGERATLSCRASQSVSSIYLAWYQQKPGQAPRLLIYGASSRATGIPDRFSGSGSGTDFTLTISRLEPEDFAVYYCQQYGSSPQTFGQGTKLEIK

SEQ ID NO: 1258 - protein, 108 aa, Artificial sequence
  VL
EIVMTQSPATLSVSPGERATLSCRASQSVTSYLAWYQQKPGQAPRLLIYGASTRATGIPARFSGSGSGTEFTLTISSLQSEDFAVYYCQQYNNWPPLTFGGGTKVEIK

SEQ ID NO: 1259 - protein, 107 aa, Artificial sequence
  VL
DIQMTQSPSTLSASVGDRVTITCRASQSITNWLAWYQQRPGKAPKLLLSKASSLESGVPSRFSGSGSGTDFTLTISSLQPDDFATYYCQQYYSYSLTFGGGTKVESK

SEQ ID NO: 1260 - protein, 111 aa, Artificial sequence
  VL
QSALTQPASVSGSPGQSITISCTGTSSDVGSYNLVSWYQQHPGKAPKLMIYEVSKRPSGVSNRFSGSKSGNTASLTISGLQAEDEADYYCCSYAGSSTFYVFGTGTKVTVL

SEQ ID NO: 1261 - protein, 107 aa, Artificial sequence
  VL
SYELTQPPSVSVSPGQTARITCSGDALPKQYAYWYQQKTGQAPVLVIYKDSERPSGIPERVSGSSSGTTVTLTISGVQAEDEADYYCQSADSSGTWVFGGGTKLTVL

SEQ ID NO: 1262 - protein, 110 aa, Artificial sequence
  VL
EIVLTQSPGTLSLSPGERATLSCRASQSVSSRYLAWYQQKPGQAPRLLIYGASRRATGIPDRFSGSGSGTDFTLTISRLEPEDFAVYYCQQYGSSPEMYTFGQGTKLEIK

SEQ ID NO: 1263 - protein, 108 aa, Artificial sequence
  VL
EIVLTQSPGTLSLSPGERATLSCRASQSVSSSYLAWYQQKPGQAPRLLIYGASSRATGIPDRFSGSGSGTDFTLTISRLEPEDFAVYYCHQYGSGLGTFGPGTKVDIK

SEQ ID NO: 1264 - protein, 111 aa, Artificial sequence
  VL
DIVMTQTPLSLSVTPGQPASISCKSSQSLLDSDGKTYLYWYLQKPGQTPQLLIYEVSDRFSGVPDRFSGSGSGTDFTLKISRVEAEDVGVYYCMQSIQLRTFGQGTKVEIK

SEQ ID NO: 1265 - protein, 109 aa, Artificial sequence
  VL
EIVLTQSPATLSLSPGERATLSCRASQRVGSSLAWYQQKPGQAPRLLIYGASNRATGIPARFSGSGSGTDFTLTITRLEPEDFAVYYCQQCSSWPLSLTFGGGTKVEIR

SEQ ID NO: 1266 - protein, 108 aa, Artificial sequence
  VL
EIVMTQSPATLSVSPGERATLSCRASQSVSSNLAWYQQKPGQAPRLLIYGASTRATGIPARFSGSGSGTEFTLTISSLQSEDFAVYYCQQYNNWPPITFGQGTRLDIK

SEQ ID NO: 1267 - protein, 107 aa, Artificial sequence
  VL
DIQMTQSPSSVSASVGDRVTITCRASQGIRFWLAWYQQKPGKAPKLLIYAASTLQSGVPSRFSGSGSGTDFTLTISSLQPEDFATYYCQQSNSFPPTFGGGTKVEIK

SEQ ID NO: 1268 - protein, 111 aa, Artificial sequence
  VL
QSVLTQPPSVSGAPGQRVTISCTGSSSNIGAGYDVHWYQQLPGTAPKLLIYGNTNRPSGVPDRFSGSKSGTSPSLAITGLQAEDEAGYYCQSYDISLSAYVFGGGTKLTVL

SEQ ID NO: 1269 - protein, 107 aa, Artificial sequence
  VL
DIQMTQSPSTLSASVGDRVTITCRASQSISSWLAWYQQKPGKAPKLLIYDASSLESGVPSRFSGSGSGTEFTLTISSLLPADFATYYCQQYNTYSLTFGQGTRLEIK

SEQ ID NO: 1270 - protein, 107 aa, Artificial sequence
  VL
AIQLTQSPSSLSASVGDRVTITCRASQGISSYLAWYQQKPGKAPKLLIYAASTLQSGVPSRFSGSGSGTDFTLTISSLQPEDFATYYCQQLNSYPPAFGGGTKVEIK

SEQ ID NO: 1271 - protein, 113 aa, Artificial sequence
  VL
EIVMTQSPDSLAVSLGERATINCKSSQSVLYSASNKNYLAWYQQKQGQSPKLLIYWASTRESGVPDRFSGSGSGTDFTLTINGLQAEDVAVYYCQQYYRTPLTFGGGTKVEIK

SEQ ID NO: 1272 - protein, 107 aa, Artificial sequence
  VL
DIQMTQSPSAMSASVGDRVTITCRASQDISNYLAWFQQRPGKVPKRLIYAASSLQSGVPSRFSGTGSGTEFTLTISSLQPEDFATYYCLQHHTYPLTFGGGTKVEIR

SEQ ID NO: 1273 - protein, 111 aa, Artificial sequence
  VL
EIVLTQTPLSLSVTPGQPASISCKSSHSLLHSDGKTYVYWYLQRPGQPPQLLIYELFNRFSGVPDRFSGSGSGTDFTLKISRVEAEDVGTYYCMQSIQLWSFGQGTKVEIK

SEQ ID NO: 1274 - protein, 109 aa, Artificial sequence
  VL
QAVVTQEPSLTVSPGGTVTLTCGSSTGAVTSGHYPYWFQQKPGQAPRTLIYDTNNKHSWTPARFSGSLLGGKAALTLSGAQPEDEAEYYCLLSYSGPWVFGGGTKLTVL

SEQ ID NO: 1275 - protein, 110 aa, Artificial sequence
  VL
QSALTQPPSASGSPGQSVTISCTGTSSDVGGYNYVSWYQQHPGKAPKLMIYEVSKRPSGVPDRFSGSKSGNTASLTVSGLQAEDEADYYCSSYAGSNNYVFGTGTKVTVL

SEQ ID NO: 1276 - protein, 108 aa, Artificial sequence
  VL
DIQMTQSPSSLSASVGDRVTITCQASQDISNYLNWYQQKPGKAPKLLIYDASNLETGVPSRFSGSGSGTDFTFTISSLQPEDIATYYCQQYDNLPSFTFGPGTKVDIK

SEQ ID NO: 1277 - protein, 110 aa, Artificial sequence
  VL
QSALTQPRSVSGSPGQSVTISCTGTSSDVGGYNYVSWYQQHPGKAPKLMIYDVNKRPSGVPDRFSGSKSGNTASLTISGLQAEDEADYYCCSYAGSYTLVFGGGTKLSVL

SEQ ID NO: 1278 - protein, 110 aa, Artificial sequence
  VL
QSALTQPASVSGSPGQSITISCTGTSSDVGSYNLVSWYQQHPGKAPKLMIYEVSKRPSGVSNRFSGSKSGNTASLTISGLQAEDEADYYCCSYAGSSTVVFGGGTKLTVL

SEQ ID NO: 1279 - protein, 108 aa, Artificial sequence
  VL
DIQMTQSPSSLSASVGDRVTISCRASQSIGKYLNWYQQKPGKAPKLLIYAASSLQSGVPSRFSGSGSGTDFTLTINNLQPEDFATYYCQQSYNVPPWTFGQGTKVEIK

SEQ ID NO: 1280 - protein, 112 aa, Artificial sequence
  VL
DVVMTQSPVSLTVTLGQPASISCRPSQSIEHSDGNIYLNWFQQRPGQSPRRLIYKISNRDSGVPDRISGSGSGTDFTLKISRVEAEDVGVYYCMQGTHWPWTFGQGTKVEIK

SEQ ID NO: 1281 - protein, 110 aa, Artificial sequence
  VL
QSVLTQPPSVSGAPGQRVIIPCTGSSSNTGAGYDVHWYQQLPGTAPKLVIYDNSHRPSGVPDRFSGSKSGTSASLAITGLQAEDEADYYCQSYDINLSAVFGGGTKLTVL

SEQ ID NO: 1282 - protein, 108 aa, Artificial sequence
  VL
EIVLTQSPGTLSLSPGERATLSCRATQSLTSSSLAWYQQKPGQAPRLLIYGASSRATGIPDRFSGSGSGTDFTLTISRLKPEDFAVYYCHQYHNSPWTFGQGTKVEIK

SEQ ID NO: 1283 - protein, 112 aa, Artificial sequence
  VL
DFVMTQSPLSLPVTPGEPASISCRSSQSLLHGNGYTYLDWYLQKPGQSPQLLIYLGSTRASGVPDRFSGSGSGTDFTLKISRVEAEDVGVYYCMQALQTPYTFGQGTKLEIK

SEQ ID NO: 1284 - protein, 108 aa, Artificial sequence [sequence omitted]

SEQ ID NO: 1285 - protein, 108 aa, Artificial sequence
  VL
EIVLTQSPGTLSLSPGERATLSCRASQSVSSSYLAWYQQKPGQAPRLLIYGASSRATGIPDRFSGSGSGTDFTLTISRLEPEDFAVYYCQQYGSSPRTFGQGTKVEIK

SEQ ID NO: 1286 - protein, 108 aa, Artificial sequence
  VL
QIVMTQSPATLSVSPGGGATLSCRASQSVSSKVAWYQQKPGQAPRLLIYGASTRATGIPARFSGSGSGTEFTLTISSLQSEDSAVYYCQQYDNWLPYTFGQGTKLEIK

SEQ ID NO: 1287 - protein, 110 aa, Artificial sequence
  VL
QAVVTQEPSLTVSPGGTVTLTCGSSTGAVTSGHYPYWFQQKPGQAPRTLIYDTSNKHSWTPARFSGSLLGGKAALTLSGAQPEDEAEYYCLLSYSGAYVLFGGGTKLTVL

SEQ ID NO: 1288 - protein, 108 aa, Artificial sequence
  VL
EIVMTQSPAILSVSPGERATLSCRASQSVTRNLAWYQQKPGQAPRLLIYGASTRATNIPARFSGSGFGTEFTLIISSLQSEDFAVYYCQQYSNWPLYTFGQGTKLEIK

SEQ ID NO: 1289 - protein, 111 aa, Artificial sequence
  VL
QSVLTQPPSASGTPGQRVTISCSGSSSNIGSNTVNWYQQLPGTAPKLLIYSNNQRPSGVPDRFSGSKSGTSASLAISGLQSEDEADYYCAAWDDSLNGPYVFGTGTKVTVL

SEQ ID NO: 1290 - protein, 110 aa, Artificial sequence
  VL
QSALTQPASVSGSPGQSITISCTGTSSDVGGYNYVSWYQHHPGKAPKLMIYEVSNRPSGVSNRFSGSKSANTASLTISGLQTEDEADYYCSSYTSISTVLFGGGTKLTVL

SEQ ID NO: 1291 - protein, 110 aa, Artificial sequence
  VL
SDALTQPPSVSVAPGKTAAITCGGDNIGSKNVHWYQQKPGQAPLLVVFDDGDRPSGIPERFSGSNSGNTATLTISRVEAGDEADYYCQVWDGGSDDRGYVFGTGTKVTVL

SEQ ID NO: 1292 - protein, 110 aa, Artificial sequence
  VL
QSALTQPASVSGSPGQSITISCTGTSSDVGAYNYVSWYQQHPGKAPKLMIYDVTKRPSGVSNRFSGSKSGNTASLTISGLQAEDEADYYCSSFTSNGAWVFGGGTKVTVL

SEQ ID NO: 1293 - protein, 107 aa, Artificial sequence
  VL
DIQMTQSPSSLSASVGDRVTITCRASQSISNYLNWYQQKPGKAPKFLIYAASTLHTGVPSRFSGSGSGTDFTLTISSLQPEDFATYYCQQNYIRPYTFGQGTKLEIK

SEQ ID NO: 1294 - protein, 107 aa, Artificial sequence
  VL
DIQMTQSPSSLSASVGDRVTITCQASQDISNYLNWYQQKPGKAPKLLIYDASNLETGVPSRFSGSGSGTDFTFTISSLQPEDIATYYCQQYDNLPITFGGGTKVEIK

SEQ ID NO: 1295 - protein, 109 aa, Artificial sequence
  VL
QSVLTQPPSTSGAPGQRVTISCSGSSSNVALNAVSWYQQLPRMAPKLLIYRDNQRPSGVPERFSGSRSGTSASLAITGLQSDDEADYYCATWDDSLNGVFGGGTKLTVL

SEQ ID NO: 1296 - protein, 107 aa, Artificial sequence
  VL
EIVMTQSPATLSVSPGERATLSCRASQSVSSNLAWYQQKPGQAPRLLIYGASSRATGIPARFSGSGSGTEFTLTISSLQSEDFGVYYCQQYNNWPYTFGQGTKLEIK

SEQ ID NO: 1297 - protein, 116 aa, Artificial sequence
  VL
QPVLTQPPSASASLGASVTLTCTLSSGYSNYKVDWYQQRPGKGPRFVMRVGTGGIVGSKGDGIPDRFSVLGSGLNRYLTIKNIQEEDESDYHCGADHGSGSNFVYVFGTGTKVTVL

SEQ ID NO: 1298 - protein, 110 aa, Artificial sequence
  VL
QSALTQPASVSGSPGQSITISCTGTSSDVGSYNLVSWYQQHPGKAPKLMIYEVSKRPSGVSNRFSGSKSGNTASLTISGLQAEDEADYYCCSYAGSSTLVFGGGTKVTVL

SEQ ID NO: 1299 - protein, 107 aa, Artificial sequence
  VL
DIKMTQSPSTLSASVGDRVTITCRASQHINRWLAWYQQKPGKAPKLLIYEASSLKSGVPSRFSGSGSGTEFTLTITSLQLDDFATYSCQQHDSAPYTFGQGTKLEIK

SEQ ID NO: 1300 - protein, 106 aa, Artificial sequence
  VL
DIQMTQSPSTLSASLGDRVMITCRASQNISRWLAWYQQKPGKAPKFLIYKASALETGVPSRFSGSGSGTEFTLTITGLQPDDFATYYCQQYNSYVTFGGGTKVEMK

SEQ ID NO: 1301 - protein, 112 aa, Artificial sequence
  VL
DIVMTQTPLSLSVTPGQPASISCKSSQSLLHSDGKTYLYWFLLKPGQSPQFLIYEVSSRFSGVPDRFRGSGSGTDFTLKISRVEAEDVGVYYCMQGKHLRWTFGQGTKVEIK

SEQ ID NO: 1302 - protein, 108 aa, Artificial sequence
  VL
SYELAQPPSVSVSPGQTARITCSGDALPIKYAYWYQQKSGQAPVLVISEDSKRPSGIPERFSGSSSGTMATLTISGAQVEDEADYYCYSTDYSGNHGVFGGGTKLTVV

SEQ ID NO: 1303 - protein, 107 aa, Artificial sequence
  VL
EIVLTQSPATLSLSPGERATLSCRASQSVSTYLAWYQQKPGQAPRLLIYDASNRATGIPARFSGSGSGTDFTLTISSLEPEDFAVYYCQQCSNWPNTFGQGTKLEIK

SEQ ID NO: 1304 - protein, 107 aa, Artificial sequence
  VL
SYELTQPPSVSVSPGQTARITCSGDELPKQYSYWFQQRPGQAPVLVIYKDRERPSGIPERFSGSHSGTTVTLTISGVQAEDEADYYCQSADSNDSWVFGGGTKLTVL

SEQ ID NO: 1305 - protein, 110 aa, Artificial sequence; identical to SEQ ID NO: 1190
  VL

SEQ ID NO: 1306 - protein, 107 aa, Artificial sequence
  VL
GIQLTQSPSSVSASLGDTVTITCRASQNINVFLAWYQQRPGSAPSLLIYAASNLQSGVPSRFVGSGSGTDFTLTISGLQPEDFATYYCQQGHNFPWTFGRGTKVEVK

SEQ ID NO: 1307 - protein, 108 aa, Artificial sequence
  VL
EIVLTQSPGTLSLSPGDRATLSCRASQSLNNNQLAWYQQKLGQAPRLLIYGASSRATGIPDKISGSGSGTVFTLTISRLEPEDFAVYYCQQYGSLPLTFGGGTKVEIK

SEQ ID NO: 1308 - protein, 108 aa, Artificial sequence; identical to SEQ ID NO: 1307
  VL

SEQ ID NO: 1309 - protein, 111 aa, Artificial sequence
  VL
QSVLTQPPSVSGAPGQRVTISCTGSSSNIGAGYDVHWYQQLPGTAPKLLIYGNSNRPSGVPDRFSGSKSGTSASLAITGLQAEDEADYYCQSYDSSLSGWVFGGGTKLTVL

SEQ ID NO: 1310 - protein, 107 aa, Artificial sequence
  VL
EIVLTQSPATLSLSPGERATLSCRASQSISSHLGWYQQKPGQAPRLLIYDASNRAPGIPARFSGSGSGTDFTLTISSLEPEDFAVYYCQQRRNWPLTFGGGTKVEIK

SEQ ID NO: 1311 - protein, 107 aa, Artificial sequence
  VL
EIVLTQSPATLSLSPGEGATLSCRASQSVASYLAWYQQKPGQAPRLLIYDASNRATGIPARFSGSGSGTDFTLTISSLEPEDFAVYYCQHRSNWPYTFGQGTKLEIK

SEQ ID NO: 1312 - protein, 110 aa, Artificial sequence
  VL
QSVLTQPPSASGTPGQRVTISCSGSSSNIGSNTVNWYQQLPGTAPKLLIYSNNQRPSGVPDRFSGSKSGTSASLAISGLQSEDEADYYCAAWDDSLNGVVFGGGTKLTVL

SEQ ID NO: 1313 - protein, 112 aa, Artificial sequence
  VL
DIVMTQTPLSSPVILGQSASISCRSSHSLLHNNGNTYLSWLHQRPGQPPRLLIYEISNRFSGVPDRFSGSGAGTDFTLKISRVEAEDVGIYYCMQTTQFPRTFGQGTKVEIR

SEQ ID NO: 1314 - protein, 108 aa, Artificial sequence
  VL
SYELTQPPSVSVSPGQTAKITCSGDALPKEFAYWYQQKPGQAPVLIIYKDKERPSGIPERFSGSSSGTTVTLTISGVQAEDEADYYCQSQDSSATYVVFGGGTKLTVL

SEQ ID NO: 1315 - protein, 106 aa, Artificial sequence
  VL
SSDLTQPPSVSVSPGQTASIACSGDKLGDKYVSWYQQKPRQSPVLVIYQDNKRPSGIPERFAGSNSGNTATLTISGTQTMDEADYYCQAWDSSIEVFGTGTKVTVL

SEQ ID NO: 1316 - protein, 109 aa, Artificial sequence
  VL
EIVLTQSPGTLSLSPGERATLSCRASQSVSSSYLAWYQQKPGQAPRLLIYGASSRATGIPDRFSGSGSGTDFTLTISRLEPEDFAVYYCQQYGSSPPWTFGQGTKVEIK

SEQ ID NO: 1317 - protein, 108 aa, Artificial sequence
  VL
SYELTQPPSVSVSPGQTARITCSADALSKQYAYWYQQKPGQAPVLVIYKDSERPSGIPERFSGSNSGTTVTLTISGVQAEDEAEYYCQSGDSSGTYVVFGGGTKLTVL

SEQ ID NO: 1318 - protein, 112 aa, Artificial sequence
  VL
DIVMTQTPLSSPVILGQSASISCRSSQSLLHNNGNTYLSWLHQRPGQPPRLLIYEISNRFSGVPDRFSGSGAGTDFTLKISRVEAEDVGIYYCMQTTQFPRTFGQGTKVEIR

SEQ ID NO: 1319 - protein, 107 aa, Artificial sequence
  VL
DIQMTQSPSAMSASVGDRVTITCRASQGIRNSLAWFQQKPGKVPKRLIYDASNLQSGVPSRFSGSGSGTEFTLTISSLQPEDFATYYCLQYNTYSYSFGQGTKLEIK

SEQ ID NO: 1320 - protein, 106 aa, Artificial sequence
  VL
DIQMTQSPSILSASVGDRVTITCRASQNISRWLAWYQQKPGKAPKFLIYKASGLESGVPSRFSGSGSGTEFTLTISSLQPDDFATYYCQQYNSYITFGGGTKIEIK

SEQ ID NO: 1321 - protein, 106 aa, Artificial sequence
  VL
DIQMTQSPSTLSASVGDRVIITCRASQNISRWLAWYQQKPGTAPKFLIYKASALESGVPSRFSGSGSGTEFTLTITSLQPDDFATYYCQQYNSYVTFGGGTKVEMK

SEQ ID NO: 1322 - protein, 108 aa, Artificial sequence
  VL
SYELTQPPSVSVSPGQTARITCSGDALPQRYAYWYQQKSGQAPVLVIYEDTKRPSGIPERFSGFSLGTLATLTISGAQVEDEADYYCYSTDSSDNQRVFGGGTKLTVL

SEQ ID NO: 1323 - protein, 107 aa, Artificial sequence
  VL
AIQLTQSPSSLSASVGDRVTITCRASQGVASYLAWYQQKPGKAPNLLIYAASTLQGGVPSRFSGSGSGTDFTLTISNLQPEDFATYYCQHLKSYPLTFGGGTKVEIK

SEQ ID NO: 1324 - protein, 107 aa, Artificial sequence
  VL
DIQMTQSPPSVSASIGDTVTITCRATQNINVFLAWYQQKPGSAPTLLIYGASSLQSGVPSRFVGSGSGTDFTLTISGLQPEDFATYYCQQGHNFPWTFGRGTKVEVK

SEQ ID NO: 1325 - protein, 107 aa, Artificial sequence
  VL
DIQMTQSPSSVSASIGDTVTITCRATQNINVFLAWYQQKPGSAPTLLIYGASSLQSGVPSRFVGSGSGTDFTLTISGLQPEDFATYYCQQGHNFPWTFGRGTKVEVK

SEQ ID NO: 1326 - protein, 107 aa, Artificial sequence
  VL
EIVMTQSPATLSVSPGERATLSCRASQSLNSNLAWYQQKPGQAPRLVIYGASTRAAGFPARFSGSGSETEFTLTISSLQSEDFAIYFCQQYHNFPLTFGQGTEVEVR

SEQ ID NO: 1327 - protein, 110 aa, Artificial sequence
  VL
QSVLTQPPSVSGAPGQRVTISCTGSSSNIGAGYDVHWYQLLPGTAPKLLIYGNNNRPSGVPDRFSGSKSGTSASLAIIGLQAEDEATYYCQSYDSSLSVVFGGGTKVTVL

SEQ ID NO: 1328 - protein, 106 aa, Artificial sequence
  VL
SYELTQPPSVSVSPGQTAIITCSGDKLGEKYASWYQQRPGQSPMLVIYQDTKRPSGIPERFSGSNSGNTATLTISGTQAVDEADYFCQAWDSNTGVFGTGTKVTVL

SEQ ID NO: 1329 - protein, 111 aa, Artificial sequence
  VL
QSVLTQPPSLSGAPGQRVTISCTGSSSNIGAGYDVHWYQQLPGTAPKLLIYGDSNRPSGVPDRFSGSKSGTSASLAITGLQAEDEADYYCQSYDSSLSGSVFGGGTKLTVL

SEQ ID NO: 1330 - protein, 110 aa, Artificial sequence
  VL
SYELTQPPSVSVSPGQTARISCSADALPKQNAYWYQCKPGQAPILLIYKDTERPSGIPERFSGSSSGTTVTLTISGVQPEDDADYYCQSVDNTGASPHVVFGGGTKLTVL

SEQ ID NO: 1331 - protein, 106 aa, Artificial sequence
  VL
DIQMTQSPSTLSASVGDSVTITCRANETIASWVAWYQQKPGKAPKLLIYKASSLESGVPSRFSGSESGTEFTLTISSLQPDDFATYYCQQYHTYWTFGQGTKVEVK

SEQ ID NO: 1332 - protein, 106 aa, Artificial sequence
  VL
SYELTQPPSVSVSPGQTASIACSGDKLGDKYTCWYQQKPGQSPVLVMYQDSKRPSGIPERFSGSNSGNTATLTISGTQVMDEADYYCQAWDSGTVVFGGGTKLTVL

SEQ ID NO: 1333 - protein, 108 aa, Artificial sequence; identical to SEQ ID NO: 1285
  VL

SEQ ID NO: 1334 - protein, 108 aa, Artificial sequence; identical to SEQ ID NO: 1285
  VL

SEQ ID NO: 1335 - protein, 108 aa, Artificial sequence
  VL
DIVLTQSPGTLSLSPGERATLSCRASQSISSSYLAWYQQKPGQAPRLVIHGASSRATGIPDRFSGSGSGTDFTLTISRLEPEDFAVYYCQHYGTSPYTFGQGTKLEIK

SEQ ID NO: 1336 - protein, 109 aa, Artificial sequence
  VL
EIVLTQSPGTLSLSPGERATLSCRASQSVSSSYLAWYQQKPGQAPRLLIYGASSRATGIPDRFSGSGSGTDFTLTISRLEPEDFAVYYCQQYGSSTLVTFGQGTKVEIK

SEQ ID NO: 1337 - protein, 110 aa, Artificial sequence
  VL
QSALTQPASVSGSPGQSITISCTGTSSDVGSYNLVSWYQQHPGKAPKLMIYEVSKRPSGVSNRFSGSKSGNTASLTISGLQAEDEADYYCCSYAGSSLWVFGGGTKLTVL

SEQ ID NO: 1338 - protein, 110 aa, Artificial sequence
  VL
NFMLTQPHSVSESPGKTVTISCTGSSGSIASNYVQWYQQRPGSAPTTVIYEDNQRPSGVPDRFSGSIDSSSNSASLTISGLKTEDEADYYCQSYDSSFWVFGGGTKLTVL

SEQ ID NO: 1339 - protein, 110 aa, Artificial sequence; identical to SEQ ID NO: 1133
  VL

SEQ ID NO: 1340 - protein, 109 aa, Artificial sequence
  VL
SYELTQPPSVSVSPGQTARITCSGDALPEKYAYWFQQKSGQAPVLVIYEDNKRPSGIPERFSGSSSGTMATLTISGAQVEDEADYYCYSTDRSGNHRGVFGTGTKVTVL

SEQ ID NO: 1341 - protein, 110 aa, Artificial sequence
  VL
SSELTQDPAVSVALGQTVRITCQGDSLRSYYASWYQQKPGQAPVLVIYGKNNRPSGIPDRFSGSSSGNTASLTITGAQAEDEADYYCNSRDSSGNHLYWVFGGGTKLTVL

SEQ ID NO: 1342 - protein, 112 aa, Artificial sequence
  VL
QSVLTQPPSVSGAPGQRVTISCTGSSSNIGAGYDVHWYQQLPGTAPKLLIYGNSNRPSGVPDRFSGSKSGTSASLAITGLQAEDEADYYCQSYDSSLSGHVVFGGGTKLTVL

SEQ ID NO: 1343 - protein, 111 aa, Artificial sequence
  VL
QSVLTQPPSVSAAPGQKVTISCSGSSSNIGNNYVSWYQQLPGTAPKLLIYDNNKRPSGIPDRFSGSKSGTSATLGITGLQTGDEADYYCGTWDSSLSAGGVFGTGTKVTVL

SEQ ID NO: 1344 - protein, 111 aa, Artificial sequence
  VL
QSALTQPASVSGSPGQSITISCTGTSSDVGSYNLVSWYQQHPGKAPKLMIYEGSKRPSGVSNRFSGSKSGNTASLTISGLQAEDEADYYCCSYAGSSTFVVFGGGTKLTVL

SEQ ID NO: 1345 - protein, 110 aa, Artificial sequence
  VL
QSVLTQPPSVSAAPGQKVTISCSGSSSNIGNNYVSWYQQFPGTAPKLLIYDNNKRPSGIPDRFSGSKSGTSATLGITGLQTGDEADYYCGTWDSSLSAVVFGGGTKLTVL

SEQ ID NO: 1346 - protein, 107 aa, Artificial sequence
  VL
AIQLTQSPSSLSASVGDRVTITCRASQGISSYLAWYQQKPGKAPKLLIYAASTLQSGVPSRFSGSGSGTDFTLTISSLQPEDFATYYCQQLNSYPPTFGQGTKVEIK

SEQ ID NO: 1347 - protein, 107 aa, Artificial sequence
  VL
DIQMTQSPSSLSASVGDRVTITCRASQSIRFYLNWYQQKPGKAPKLLIYAASSLQSGVPSRFSGSGSGTDFTLTISSLQPEDFATYYCQQSYSTLWTFGQGTKVEIK

SEQ ID NO: 1348 - protein, 108 aa, Artificial sequence
  VL
EIVLTQSPGTLSLSPGERATLSCRASQSVSSTYLAWYQQKPGQAPRLLIYDASSRATGIPDRFSGGGSGTDFTLTISRLEPEDFAVYYCQQYGDSPETFGQGTKVEIK

SEQ ID NO: 1349 - protein, 106 aa, Artificial sequence
  VL
SYELTQPPSVSVSPGQTASITCSGDKLGDNYASWYQQKSGQSPVLVIYQDTKRPSGIPERFSGSNSGNTATLTISGTQAMDEADYYCQAWDSSTVVFGGGTKLTVL

SEQ ID NO: 1350 - protein, 107 aa, Artificial sequence; identical to SEQ ID NO: 1189
  VL

SEQ ID NO: 1351 - protein, 107 aa, Artificial sequence; identical to SEQ ID NO: 1189
  VL

SEQ ID NO: 1352 - protein, 108 aa, Artificial sequence
  VL
EIVLTQSPATLSLSPGERATLSCRASQSVSSYLAWYQQKPGQAPRLLIYDASNRATGIPARFSGSGSGTDFTLTISSLEPEDFAVYYCQQRSNWPSITFGQGTRLEIK

SEQ ID NO: 1353 - protein, 107 aa, Artificial sequence
  VL
DIQMTQSPSSVSASVGDRVTITCRASQGISNWLAWYQQKPGKAPKLLIYAASSLQSGVPSRFSGSGSGTDFTLTISSLQPEDFATYYCQQANSFPLAFGGGTKVEIK

SEQ ID NO: 1354 - protein, 107 aa, Artificial sequence
  VL
DIQMTQSPSSLSASVGDRVTITCRASQSISSYLNWYQQKPGKAPKLLIYAASSLQSGVPSRFSGSGSGTDFTLTISSLQPEDFATYYCQQSYSTPFGFGPGTKVDIK

SEQ ID NO: 1355 - protein, 111 aa, Artificial sequence
  VL
QSVLTQPPSVSGAPGQRVTISCTGSRSNIGAGFDVHWYQQLPGTAPKLLIYGNSNRPSGVPDRFSGSKSGTSASLAITGLQAEDEAVYYCLSYDSSLSGSVFGGGTKLTVL

SEQ ID NO: 1356 - protein, 107 aa, Artificial sequence
  VL
AIQLTQSPSSLSASVGDRVTITCRASQGISSALAWYQQKPGKAPKVLIYDASSLESGVPPRFSGSGSGTDFTLTISSLQPEDFATYYCQQFNNYPLTFGGGTKVEIK

SEQ ID NO: 1357 - protein, 107 aa, Artificial sequence
  VL
DIQMTQSPSSLSASVGDRVTITCQASQDMSNYLNWYQQKPGKAPKLLIYDASNLETGVPSRFSGSGSGTDFTFTISSLQPEDIATYYCQQYDNLPFTFGPGTKVDIK

SEQ ID NO: 1358 - protein, 110 aa, Artificial sequence
  VL
QSALTQPASVSGSPGQSITISCTGTSSDVGGYNYVSWYQQHPGKAPKLMIYDVSNRPSGVSNRFSGSKSGNTASLTISGLQAEDEADYYCSSYTSSSAYVFGTGTKVTVL

SEQ ID NO: 1359 - protein, 108 aa, Artificial sequence
  VL
SSELTQDPAVSVALGQTVRITCQGDSLRSYSASWYQQKPGQAPVLVIYVKNNRPSGIPDRFSGSSSGNTASLTITGAQAEDEADYYCNSRDSSGNHVVFGGGTRLTVL

SEQ ID NO: 1360 - protein, 110 aa, Artificial sequence
  VL
QSALTQPRSVSGSPGQSVTISCTGTSSDVGDYDYVSWYQHHPGKAPKLMIYDVSKRPSGVPDRFSGSKSGNTASLTISGLQAEDDADYYCCSYAGSYPVVFGGGTKLTVL

SEQ ID NO: 1361 - protein, 109 aa, Artificial sequence
  VL
QSALTQPPSASGSPGQSVTISCTGTSSDVGGYNYVSWYQQHPGKAPKLMIYEVSKRPSGVPDRFSGSKSGNTASLTVSGLQAEDEADYYCSSYAGSNKVFGGGTKLTVL

SEQ ID NO: 1362 - protein, 109 aa, Artificial sequence
  VL
EIVLTQSPGTLSLSPGERATLSCRASQSVSSSYLAWYQQKPGQAPRLLIYGASSRATGIPDRFSGSGSGTDFTLTISRLEPEDFAVYYCQQYGSSGGYTFGQGTKLEIK

SEQ ID NO: 1363 - protein, 107 aa, Artificial sequence; identical to SEQ ID NO: 1178
  VL

SEQ ID NO: 1364 - protein, 108 aa, Artificial sequence
  VL
EIVLTQSPGTLSLSPGERATLSCRASQSVSSSYLAWYQQKPGQAPRLLIYGASSRATGIPDRFSGSGSGTDFTLTISRLEPEDFAVYYCQQYGSSSWTFGQGTKVEIK

SEQ ID NO: 1365 - protein, 107 aa, Artificial sequence; identical to SEQ ID NO: 1178
  VL

SEQ ID NO: 1366 - protein, 108 aa, Artificial sequence
  VL
SYELTQPPSVSVSPGQTASITCSGDKLGNKYACWYQQKPGQSPVLVIYQDSKRPSGIPERFSGSNSGNTATLTISGTQAMDEADYYCQAWDSSTANWVFGGGTKLTVL

SEQ ID NO: 1367 - protein, 111 aa, Artificial sequence
  VL
QSALTQPASVSGSPGQSITISCTATSGDVGGYNYVSWYQQHPGKAPKLMIFDVYNRPSGVSNRFSGSKSGNTASLTISGLQAEDEADYYCSSFTDSSTLVVFGGGTKLTVL

SEQ ID NO: 1368 - protein, 107 aa, Artificial sequence
  VL
DIQMTQSPSSLSASVRDKVTITCRASQSISSCLNWYQQKPGKAPKVLIYAASSLQSGVPSRFSGSGSGTDFTLTISSVQPEDFATYYCQQSYSVPHTFGQGTKVEIK

SEQ ID NO: 1369 - protein, 106 aa, Artificial sequence
  VL
EIVMTQSPATLSVSPGERATLSCRASQSVSSNLAWYQQKPGQAPRLLIYGASTRATGIPARFSGSGSGTEFTLTISSLQSEDFAVYYCQQYNNWLTFGGGTKVEIK

SEQ ID NO: 1370 - protein, 108 aa, Artificial sequence
  VL
EIVMTQSPATLSVSPGERVTLSCRASQSINRNLAWYQQKPGQAPRLLVYDASTRAPGIPTRVSGSGSGTDFTLTISSLQSEDFAVYYCQQYNNWPPITFGQGTRLEIQ

SEQ ID NO: 1371 - protein, 108 aa, Artificial sequence
  VL
EIVMTQSPATLSVSPGERVTLSCRASQSVNRNLAWYQQKPGQAPRLLVYDASTRAPGIPTRVRGSGSGTDFTLTISSLQSEDFAVYYCQQYNNWPPITFGQGTRLEIQ

SEQ ID NO: 1372 - protein, 110 aa, Artificial sequence
  VL
QTALTQPPSASGSPGQSVTISCTGSSGDVGGYNYVSWYQQYPGKAPKLILSEVSQRPSGVPDRFFGSKSGNTASLTVFGLQAEDEADYYCSSYAGTNKILFGGGTKLTVL

SEQ ID NO: 1373 - protein, 107 aa, Artificial sequence
  VL
DIQMTQSPSSLSASVGDRVTITCRASQSISSFLNWFQQKPGKAPKLLIYAASSLQGGVPSRFSGSGSGTDFTLTINSLQPEDFATYYCQQSYSTPLTFGGGTKVEIK

SEQ ID NO: 1374 - protein, 110 aa, Artificial sequence
  VL
QSALTQPASVSGSPGQSITISCTGTSSDVGGYNYVSWYQQHPGKAPKLMIYDVSKRPSGVSNRFSGSKSGNTASLTISGLQAEDEADYYCSSYTSSSTWVFGGGTKLTVL

SEQ ID NO: 1375 - protein, 107 aa, Artificial sequence; identical to SEQ ID NO: 1178
  VL

SEQ ID NO: 1376 - protein, 112 aa, Artificial sequence
  VL
DIVMTQSPLSLPVTPGEPASISCRSSQSLLHSNGYNYLDWYLQKPGQSPQLLIYLGSNRASGVPDRFSGSGSGTDFTLKISRVEAEDVGVYYCMQALQTPGTFGQGTRLEIK

SEQ ID NO: 1377 - protein, 112 aa, Artificial sequence; identical to SEQ ID NO: 1376
  VL

SEQ ID NO: 1378 - protein, 106 aa, Artificial sequence
  VL
DIQMTQSPSTLSASVGDRVTITCRASQSISSWLAWYQQKPGKAPKLLIYKASSLESGVPSRFSGSGSGTEFTLTISSLQPDDFATYYCQQYNSYSAFGQGTKLEIK

SEQ ID NO: 1379 - protein, 106 aa, Artificial sequence
  VL
PYDLTQPPSVSVSPGQTATITCSGDKLGKKYACWYQQKPGQSPVLLIYQDVKRPSGIPERFSGSNSGTTATLTISETQTMDEADYYCQAWDRTTATFGGGTRLTVL

SEQ ID NO: 1380 - protein, 111 aa, Artificial sequence; identical to SEQ ID NO: 1309
  VL

SEQ ID NO: 1381 - protein, 112 aa, Artificial sequence
  VL
QSALTQPASVSGSPGQSITISCTGTTFDVGVYDFVSWYQQLPGKAPKLIIHDDTHRPSGVSDRFSGSRSGTTASLTISGLQADDEADYYCSSYTSLNTLEVVFGGGTKLTVL

SEQ ID NO: 1382 - protein, 112 aa, Artificial sequence
  VL
DIVMTQSPLSLPVTPGEPASMSCKSTQSLLHSNGNYYVTWYLQKPGQSPHLLIYLASNRASGVPDRFSGSGSGTDFTLKISSVEAEDVGVYYCMQALQTPYSFGQGTKLEIK

SEQ ID NO: 1383 - protein, 109 aa, Artificial sequence
  VL
SYVLTQPPSVSVAPGKTARITCGGNNIGSKSVHWYQQKPGQAPVLVIYYDSDRPSGIPERFSGSNSGNTATLTISRVEAGDEADYYCQVWDSSSDRTVVFGGGTKLTVL

SEQ ID NO: 1384 - protein, 110 aa, Artificial sequence
  VL
QSVLTQPPSASGTPGQRVTISCSGSSSNIGNNYVYWYQHLPGTAPKLLIYRNNQRPSGVPDRFSGSKSGTSASLAISGLRSENEADYYCASWDDKVRGWVFGGGTKLTVL

SEQ ID NO: 1385 - protein, 108 aa, Artificial sequence; identical to SEQ ID NO: 1110
  VL

SEQ ID NO: 1386 - protein, 107 aa, Artificial sequence
  VL
DIQMTQSPSTLSASVGDRVTITCRASQSISSWLAWYQQKPGKAPKLLIYKASSLESGVPSRFSGSGSGTEFTLTISSLQPDDFATYYCQQYNSYSRTFGQGTKVEIK

SEQ ID NO: 1387 - protein, 107 aa, Artificial sequence
  VL
DIQMTQSPSTLSASVGDRVTITCRASQSISDWLAWYQQKPGKAPKLLIYKASTLEGGVPSRFSGSESGTEFTLTISSLQPDDFATYYCQQYNTSPLTFGGGTKVEIK

SEQ ID NO: 1388 - protein, 111 aa, Artificial sequence
  VL
QSVLTQPPSVSGAPGQRVTISCTGSSSNIGAGYDVHWYQQLPGTAPKLLIYGNSNRPSGVPDRFSGSKSGTSASLAITGLQAEDEADYYCQSYDSSLSGSLFGGGTKLTVL

SEQ ID NO: 1389 - protein, 108 aa, Artificial sequence
  VL
SYELTQPPSVSVSPGQTARITCSGDALPKQYAYWYQQKPGQAPVLVIYKDSERPSGIPERFSGSSSGTTVTLTISGVQAEDEADYYCQSADSSGTYRVFGGGTKLTVL

SEQ ID NO: 1390 - protein, 105 aa, Artificial sequence
  VL
EIVLTQSPGTLSLSPGERATLSCRASQSVSSSYLAWYQQKPGQAPRLLIYGASSRATGIPDRFSGSGSGTDFTLTISRLEPEDFAVYYCQQYGRTFGQGTKVEIK

SEQ ID NO: 1391 - protein, 112 aa, Artificial sequence
  VL
QSALTQPASVAGSPGQTITISCTGPNSDINSYDYVSWYQQRPGKAPKLIIHDVDHRPSGVSDRFSGFMSDNTASLTISGLQAEDEAHYYCSSYTNIDTLEIVFGAGTKLTVL

SEQ ID NO: 1392 - protein, 107 aa, Artificial sequence
  VL
DIQMTQSPSAMSASVGDRVTITCRASQGISNYLAWFQQKPGKVPKRLIYAASSLQSGVPSRFSGSGSGTEFTLTISSLQPEDFATYYCLQHNSYPRTFGQGTKVEIK

SEQ ID NO: 1393 - protein, 108 aa, Artificial sequence
  VL
SYELTQPPSVSVAPGKAASITCGGINIGSKSVHWYQQKPGQAPVLVVYDDSDRPSGIPERFSGSNSGNTATLTISRVESGDEADYYCQVWHSSFDPWVFGGGTKLTVL

SEQ ID NO: 1394 - protein, 108 aa, Artificial sequence
  VL
DIQMTQSPSSLSASVGDRVTITCRASQSISSYLNWYQQKPGKAPKLLIYAASSLQSGVPSRFSGSGSGTDFTLTISSLQPEDFATYYCQQSYSTPPTTFGPGTKVDIK

SEQ ID NO: 1395 - protein, 107 aa, Artificial sequence
  VL
DIQMTQSPSTLSASVGDRVTITCRASQSISSWLAWYQQKPGKAPKLLIYKASSLESGVPSRFSGSGSGTEFTLTISSLQPDDFATYYCQQYNSYFPTFGQGTKVEIK

SEQ ID NO: 1396 - protein, 109 aa, Artificial sequence
  VL
SYVLTQPPSVSVAPGKTARITCGGNNIGSKSVHWYQQKPGQAPVLVVYDDNDRPSGIPDRFSGSNSGNTATLTISRVEAGDEADYYCQVWDSSSDHYWVFGGGTKLTVL

SEQ ID NO: 1397 - protein, 110 aa, Artificial sequence; identical to SEQ ID NO: 1190
  VL

SEQ ID NO: 1398 - protein, 112 aa, Artificial sequence
  VL
QLVVTQSPSASASLGASVKLTCTLSSGHSSYVIAWHQQQPEKGPRFLMKLNSDGSHNKGDGIPDRFSGSSSGAERYLTISNLQSEDEADYYCQTWGTGPQVLFGGGTKLTVL

SEQ ID NO: 1399 - protein, 106 aa, Artificial sequence
  VL
DIQMTQSPSSLSASVGDRVTITCQASQDISNYLNWYQQKPGRAPKLLIYDASNLETGVPSRFSGSGSGTDFTFTISSLQPEDIATYYCQQYDNLLTFGGGTKVEIK

SEQ ID NO: 1400 - protein, 108 aa, Artificial sequence
  VL
SYVLTQPPSVSVAPGKTARITCGGNNIGSKSVHWYQQKPGQAPVLVVYDDSDRPSGIPERFSGSNSGNTATLTISRVEAGDEADYYCQVWDSSGDHWVFGGGTKLTVL

SEQ ID NO: 1401 - protein, 106 aa, Artificial sequence
  VL
EIVLTQSPATLSLSPGERATLSCRASQSVSNYLAWYQQKPGQVPRLLIYDASNRATGIPARFSGSGSGTDFTLTISSLEPEDFAVYYCQQRSNWLTFGGGTKVEIK

SEQ ID NO: 1402 - protein, 108 aa, Artificial sequence
  VL
DIQMTQSPSSLSASVGDRVTITCQASQDISNYLNWYQQKPGKAPKLLISDASLLETGVPSRFSGSGSGTDFTFTISSLQPEDIATYYCQQHDNLPSFTFGPGTKVDIK

SEQ ID NO: 1403 - protein, 108 aa, Artificial sequence; identical to SEQ ID NO: 1285
  VL

SEQ ID NO: 1404 - protein, 108 aa, Artificial sequence
  VL
EIVLTQSPGTLSLSPGERATLSCRASQSVSSSYLAWYQQTPGQAPRLLIYGASSRATGIPDRFSGSGSGTDFTLTISRLEPEDFAVYYCQQYGSSPRTFGQGTKVEIK

SEQ ID NO: 1405 - protein, 109 aa, Artificial sequence
  VL
QTVVTQEPSLTVSPGGTVTLTCASSTGAVTSGYYPNWFQQKPGQAPRALIYSTSNKHSWTPARFSGSLLGGKAALTLSGVQPEDEAEYYCLLYYGGAPVFGGGTKLTVL

SEQ ID NO: 1406 - protein, 107 aa, Artificial sequence
  VL
DIQLTQSPSFLSASVGDRVTITCRASQGISSYLAWYQQKPGKAPKLLIYAASTLQSGVPSRFSGSGSGTEFTLTISSLQPEDFATYYCQQLNSYPPAFGQGTKVEIK

SEQ ID NO: 1407 - protein, 107 aa, Artificial sequence
  VL
DIQMTQSPSSLSASVGDRVTITCQASQDISNYLNWYQQKPGKAPKLLIYDASNLETGVPSRFSGSGSGTDFTFTISSLQPEDIATYYCQQYDNLPQTFGPGTKVDIK

SEQ ID NO: 1408 - protein, 110 aa, Artificial sequence; identical to SEQ ID NO: 1337
  VL

SEQ ID NO: 1409 - protein, 110 aa, Artificial sequence
  VL
NFMLTQPHSVSESPGKTVTISCTRSSGSIASNYVQWYQQRPGSAPTTVIYEDNQRPSGVPDRFSGSIDSSSNSASLTISGLKTEDEADYYCQSYDSSNQVFGGGTKLTVL

SEQ ID NO: 1410 - protein, 107 aa, Artificial sequence
  VL
EIVLTQSPATLSLSPGERATLSCRASQSVSSYLAWYQQKPGQAPRLLIYDASNRATGIPARFSGSGSGTDFTLTISSLEPEDFAVYYCQQRSNWLFTFGPGTKVDIK

SEQ ID NO: 1411 - protein, 110 aa, Artificial sequence; identical to SEQ ID NO: 1190
  VL

SEQ ID NO: 1412 - protein, 112 aa, Artificial sequence
  VL
VIVLTQTPLSSPVTLGQPASISCRSRRSLVHTNGNTYLSWLHQRPGQTPRLLIHNVSNRFSGVPDRFSGSGAGTDFTLNISRVEADDVGIYYCMQASQFPLTFGGGTKLEIK

SEQ ID NO: 1413 - protein, 109 aa, Artificial sequence
  VL
QSALTQPASVSGSPGQSITISCTGTFSDIGNYDLVSWYQQHPGKAPKVIIYEGYKRPSGVSDRFSGSKSGNTASLTISGLQAEDEADYFCCSFAGSNREFGGGTKLTVL

SEQ ID NO: 1414 - protein, 108 aa, Artificial sequence; identical to SEQ ID NO: 1110
  VL

SEQ ID NO: 1415 - protein, 110 aa, Artificial sequence
  VL
QSVLTQPPSVSAAPGQKVTISCSGSSSNIGNNYVSWYQQLPGTAPKLLIYDNNKRPSGIPDRFSGSKSGTSATLGITGLQTGDEADYYCGTWDSSLSAWVFGGGTKLTVL

SEQ ID NO: 1416 - protein, 108 aa, Artificial sequence
  VL
EIVLTQSPGTLSLSPGERATLSCRASQSVSNYLAWYQHKPGQAPRLLIYGASNGATGIPDRFSGSGSGTDFTLTISRLEPEDFAVYYCQHYSSSAPITFGQGTRLEIK

SEQ ID NO: 1417 - protein, 107 aa, Artificial sequence
  VL
EIVLTQSPATLSLSPGERATLSCRASQSVSSYLAWYQQKPGQAPRLLIFDASNRATGIPARFSGSGSGTDFTLTISSLEPEDFAVYYCQQRNKWPGTFGQGTKVEIK

SEQ ID NO: 1418 - protein, 108 aa, Artificial sequence
  VL
ETVLTQSPGTLSLSPGERATLSCRASQSVNSNYLAWYQQKPGQAPRLLIYGASSRATGIPDNFSGSGSGTDFTLTISRLEPEDFAVYYCQQYGDSPYTFGQGTNLEIK

SEQ ID NO: 1419 - protein, 107 aa, Artificial sequence
  VL
AIQLTQSPSSLSASVGDRVTITCRASQGISSSLAWYQQKPGKAPKLLIYSASTLQSGVPSRFSGSGSGTDFTLTITSLQPEDFATYYCQQLNSYPLTFGGGTKVEIK

SEQ ID NO: 1420 - protein, 110 aa, Artificial sequence
  VL
QSALTQPASVSGSPGQSITISCTGTSSDVGTYNLVSWYQQHPGKAPKLMIYEVSKRPSGVSNRFSGSKSGNTASLTISGLQAEDEADYYCCTYAGSSTWVFGGGTKLTVL

SEQ ID NO: 1421 - protein, 107 aa, Artificial sequence
  VL
DIQMTQSPSSLSASVGDRVTITCRASQSIAKFLNWYQKKPGKAPNLLISTASSFQSGVPSRFSGSGSGTDYTLTISGLQPEDFATYYCQQSYSSPYTFGQGTNLEIK

SEQ ID NO: 1422 - protein, 107 aa, Artificial sequence
  VL
DIQMTQSPSSVSASVGDRVTITCRASQGISSWLAWYQQKPGKAPKLLIYAASSLQSGIPSRFSGSGSGTDFTLTISSLQPEDFATYYCQQANSFPRTFGQGTKVEIK

SEQ ID NO: 1423 - protein, 107 aa, Artificial sequence
  VL
AIQLTQSPSSLSASVGDRVTITCRASQGISSALAWYQQKPGKAPKVLIYDASGLQSGVPSRFSGGGSGTDFTLTISSLQPEDFATYYCQQFNDYPLTFGGGTKVEIK

SEQ ID NO: 1424 - protein, 111 aa, Artificial sequence
  VL
QSVLTQPPSVSGAPGQRVTISCTGSNSNIGAGYDVHWYQQLPGTAPKLLIYVNTNRPSGVPDRFSGSKSGTSASLAITGLQAEDEAHYYCQSYDSSLSGSVFGGGTKLTVL

SEQ ID NO: 1425 - protein, 106 aa, Artificial sequence
  VL
DIQMTQSPSTLSASVGDRVTITCRASQIISSWLAWYQQKPGKAPKLLIYKASSLESGVPSRFSGSGSGTEFTLTISSLQPDDFATYYCQQYSTYYTFGQGTKLEIK

SEQ ID NO: 1426 - protein, 112 aa, Artificial sequence
  VL
DVVLTQSPLSLPVTLGQPASISCRSSHSLVYSDGYTHLHWIQERPGQSPRRLIYSVSHRDSGVPDRFSGSGSATDFTLQISRVEAEDVGVYYCMQGSHWPWTFGQGTKVEIK

SEQ ID NO: 1427 - protein, 111 aa, Artificial sequence
  VL
QSVLTQPPSASGTPGQRVTISCSGSSSNIGSNTVNWYQQLPGTAPKLLIYSNNQRPSGVPDRFSGSKSGTSASLAISGLQSEDEADYYCAAWDDSLNGPWVFGGGTKLTVL

SEQ ID NO: 1428 - protein, 110 aa, Artificial sequence
  VL
QSALTQPRSVSGSPGQSVTISCTGTSSDVGGYNYVSWYQQYPGKAPKLMIYEVSKRPSGVPDRFSGSKSGNTASLTISGLQAEDEADYYCCSYAGSYTWVFGTGTKVTVL

SEQ ID NO: 1429 - protein, 107 aa, Artificial sequence
  VL
DIQLTQSPSFLSASVGDRVTITCRASQGISSYLAWYQQKPGKAPKLLIYAASTLQVGVPSRFSGSGSGTEFTLTISSLQPEDFATYFCQQLNSYPFTFGPGTKVDIK

SEQ ID NO: 1430 - protein, 107 aa, Artificial sequence
  VL
DIQMTQSPSSLSASVGDRVTITCQASQDISNYLNWYQQKPGKAPKLLIYDASNLETGVPSRFSGSGSGTDFTFTISSLQPEDIATYYCQQYDNLPRTFGQGTKVEIK

SEQ ID NO: 1431 - protein, 107 aa, Artificial sequence
  VL
DIQLTQSPSFLSASVGDRVTITCRASQGISSYLAWYQQKPGKAPKLLIYAASTLQSGVPSSFSGSGSGTEFTLTISSLQPEDFATYYCQQLNSYPLTFGGGTKVEIK

SEQ ID NO: 1432 - protein, 108 aa, Artificial sequence
  VL
DIQMTQSPSSLSASVGDRVTITCRASQSISNFLNWYQQKPGKAPKLLIYAASSLQSGVPSRFSGSGSGTGFTLTISSLQPEDFATYYCQQSYSTPPDTFGQGTRLEIK

SEQ ID NO: 1433 - protein, 107 aa, Artificial sequence
  VL
DIQMTQSPSSLSASVGDRVTITCQASQDISNYLNWYQQKPGKAPKLLIYDASNLETGVPSRFSGSGSGTDFTFTISSLQPEDIATYYCQQYDNLPPTFGGGTKVEIK

SEQ ID NO: 1434 - protein, 108 aa, Artificial sequence
  VL
DIQMTQSPSSLSASVGDRVTITCRASQSISSYLNWYQQKPGKAPKLLIYAASSLQSGVPSRFSGSGSGTDFTLTISSLQPEDFATYYCQQSYTTPLFTFGPGTKVDIK

SEQ ID NO: 1435 - protein, 108 aa, Artificial sequence
  VL
DIQLTQSPSSLSASVGDRVTITCRASQGISSYLAWYQQKPGKAPKLLIYAASTLQSGVPSRFSGSGSGTDFTLTISSLQPEDFATYYCQQLNGYPHSAFGPGTKVDIK

SEQ ID NO: 1436 - protein, 107 aa, Artificial sequence
  VL
DIQMTQSPSSLSASVGDRVTITCQASQDIINYLNWYQQKPGKAPKLLIYGASNLETGVPSRFSGGGSGTDFTFTISSLQPEDIATYYCHQYDNLPPTFGQGTRLEIK

SEQ ID NO: 1437 - protein, 107 aa, Artificial sequence
  VL
DIQLTQSPSFLSASVGDRVTITCRASQGISSYLAWYQQKPGKAPKLLIYAASTLQSGVPSRFSGSGSGTEFTLTISSLQPEDFATYYCQQLNSYPLTFGGGTKVEIK

SEQ ID NO: 1438 - protein, 108 aa, Artificial sequence
  VL
DIQLTQSPSSLSASVGDRVTITCRASQGISSYLAWYQQKPGKAPKLLIYAASTLQSGVPSRFSGSGSGTDFTLTISSLQPEDVATYYCQQLNSNPPITFGPGTKVDIK

SEQ ID NO: 1439 - protein, 108 aa, Artificial sequence
  VL
DIQMTQSPSSLSASVGDRVTITCRASQSISSYLNWYQQKPGKAPKLLIFAASSLQTGAPSRFSGSGSGTDFTLTISSLQPEDFATYYCQQSYSTPPYTFGQGTKLEIK

SEQ ID NO: 1440 - protein, 107 aa, Artificial sequence
  VL
DIQMTQSPSSLSASVGDRVTITCQASQDINKYLNWYQQKPGKAPKLLIFDASHLETGVPSRFSASGSGTDFTFTISSLQPEDIATYYCHQYDNLPRTFGQGTRLEIK

SEQ ID NO: 1441 - protein, 8 aa, Artificial sequence
  VH CDR1
GGSFSDYY

SEQ ID NO: 1442 - protein, 8 aa, Artificial sequence
  VH CDR1
GGSFSDYF

SEQ ID NO: 1443 - protein, 8 aa, Artificial sequence
  VH CDR1
GITVSSNY

SEQ ID NO: 1444 - protein, 8 aa, Artificial sequence
  VH CDR1
GYTFTSYA

SEQ ID NO: 1445 - protein, 7 aa, Artificial sequence
  VH CDR2
ITHSGST

SEQ ID NO: 1446 - protein, 7 aa, Artificial sequence
  VH CDR2
INHSGST

SEQ ID NO: 1447 - protein, 7 aa, Artificial sequence
  VH CDR2
IYSGGST

SEQ ID NO: 1448 - protein, 8 aa, Artificial sequence
  VH CDR2
INTNTGNP

SEQ ID NO: 1449 - protein, 6 aa, Artificial sequence
  VL CDR1
QSVSTY

SEQ ID NO: 1450 - protein, 6 aa, Artificial sequence
  VL CDR1
QSVSSY

SEQ ID NO: 1451 - protein, 6 aa, Artificial sequence
  VL CDR1
QGISSY

SEQ ID NO: 1452 - protein, 6 aa, Artificial sequence
  VL CDR1
QSISSW

SEQ ID NO: 1453 - protein, 3 aa, Artificial sequence
  VL CDR2
DAS

SEQ ID NO: 1454 - protein, 3 aa, Artificial sequence
  VL CDR2
DAS

SEQ ID NO: 1455 - protein, 3 aa, Artificial sequence
  VL CDR2
AAS

SEQ ID NO: 1456 - protein, 3 aa, Artificial sequence
  VL CDR2
KAS

SEQ ID NO: 1457 - protein, 330 aa, Artificial sequence [sequence omitted]

SEQ ID NO: 1458 - protein, 107 aa, Artificial sequence [sequence omitted]

SEQ ID NO: 1459 - protein, 223 aa, Artificial sequence
  RBD of S protein
RVQPTESIVRFPNITNLCPFGEVFNATRFASVYAWNRKRISNCVADYSVLYNSASFSTFKCYGVSPTKLNDLCFTNVYADSFVIRGDEVRQIAPGQTGKIADYNYKLPDDFTGCVIAWNSNNLDSKVGGNYNYLYRLFRKSNLKPFERDISTEIYQAGSTPCNGVEGFNCYFPLQSYGFQPTNGVGYQPYRVVVLSFELLHAPATVCGPKKSTNLVKNKCVNF

SEQ ID NO: 1460 - protein, 1273 aa, Artificial sequence
  S protein
MFVFLVLLPLVSSQCVNLTTRTQLPPAYTNSFTRGVYYPDKVFRSSVLHSTQDLFLPFFSNVTWFHAIHVSGTNGTKRFDNPVLPFNDGVYFASTEKSNIIRGWIFGTTLDSKTQSLLIVNNATNVVIKVCEFQFCNDPFLGVYYHKNNKSWMESEFRVYSSANNCTFEYVSQPFLMDLEGKQGNFKNLREFVFKNIDGYFKIYSKHTPINLVRDLPQGFSALEPLVDLPIGINITRFQTLLALHRSYLTPGDSSSGWTAGAAAYYVGYLQPRTFLLKYNENGTITDAVDCALDPLSETKCTLKSFTVEKGIYQTSNFRVQPTESIVRFPNITNLCPFGEVFNATRFASVYAWNRKRISNCVADYSVLYNSASFSTFKCYGVSPTKLNDLCFTNVYADSFVIRGDEVRQIAPGQTGKIADYNYKLPDDFTGCVIAWNSNNLDSKVGGNYNYLYRLFRKSNLKPFERDISTEIYQAGSTPCNGVEGFNCYFPLQSYGFQPTNGVGYQPYRVVVLSFELLHAPATVCGPKKSTNLVKNKCVNFNFNGLTGTGVLTESNKKFLPFQQFGRDIADTTDAVRDPQTLEILDITPCSFGGVSVITPGTNTSNQVAVLYQDVNCTEVPVAIHADQLTPTWRVYSTGSNVFQTRAGCLIGAEHVNNSYECDIPIGAGICASYQTQTNSPRRARSVASQSIIAYTMSLGAENSVAYSNNSIAIPTNFTISVTTEILPVSMTKTSVDCTMYICGDSTECSNLLLQYGSFCTQLNRALTGIAVEQDKNTQEVFAQVKQIYKTPPIKDFGGFNFSQILPDPSKPSKRSFIEDLLFNKVTLADAGFIKQYGDCLGDIAARDLICAQKFNGLTVLPPLLTDEMIAQYTSALLAGTITSGWTFGAGAALQIPFAMQMAYRFNGIGVTQNVLYENQKLIANQFNSAIGKIQDSLSSTASALGKLQDVVNQNAQALNTLVKQLSSNFGAISSVLNDILSRLDKVEAEVQIDRLITGRLQSLQTYVTQQLIRAAEIRASANLAATKMSECVLGQSKRVDFCGKGYHLMSFPQSAPHGVVFLHVTYVPAQEKNFTTAPAICHDGKAHFPREGVFVSNGTHWFVTQRNFYEPQIITTDNTFVSGNCDVVIGIVNNTVYDPLQPELDSFKEELDKYFKNHTSPDVDLGDISGINASVVNIQKEIDRLNEVAKNLNESLIDLQELGKYEQYIKWPWYIWLGFIAGLIAIVMVTIMLCCMTSCCSCLKGCCSCGSCCKFDEDDSEPVLKGVKLHYT

SEQ ID NO: 1461 - protein, 8 aa, Artificial sequence
  VH CDR1
GFTFSSYG

SEQ ID NO: 1462 - protein, 8 aa, Artificial sequence
  VH CDR1
GFTFSSYG

SEQ ID NO: 1463 - protein, 8 aa, Artificial sequence
  VH CDR1
GYSFTSYW

SEQ ID NO: 1464 - protein, 8 aa, Artificial sequence
  VH CDR1
GYSFTSYW

SEQ ID NO: 1465 - protein, 8 aa, Artificial sequence
  VH CDR1
GYSFTSYW

SEQ ID NO: 1466 - protein, 8 aa, Artificial sequence
  VH CDR1
GYSFTSYW

SEQ ID NO: 1467 - protein, 8 aa, Artificial sequence
  VH CDR1
GYSFTSYW

SEQ ID NO: 1468 - protein, 9 aa, Artificial sequence
  VH CDR1
GGSINRNHF

SEQ ID NO: 1469 - protein, 9 aa, Artificial sequence
  VH CDR1
GGSINRNHF

SEQ ID NO: 1470 - protein, 8 aa, Artificial sequence
  VH CDR1
GYTFTSYG

SEQ ID NO: 1471 - protein, 8 aa, Artificial sequence
  VH CDR1
GFTFSYFE

SEQ ID NO: 1472 - protein, 8 aa, Artificial sequence
  VH CDR1
GFTFSYFE

SEQ ID NO: 1473 - protein, 8 aa, Artificial sequence
  VH CDR1
GYKFSNYY

SEQ ID NO: 1474 - protein, 8 aa, Artificial sequence
  VH CDR1
GYIFTNFY

SEQ ID NO: 1475 - protein, 8 aa, Artificial sequence
  VH CDR1
GFNFSSYA

SEQ ID NO: 1476 - protein, 8 aa, Artificial sequence
  VH CDR1
GIIVSRNE

SEQ ID NO: 1477 - protein, 8 aa, Artificial sequence
  VH CDR1
GGTFSTYA

SEQ ID NO: 1478 - protein, 8 aa, Artificial sequence
  VH CDR1
GFTFSSYG

SEQ ID NO: 1479 - protein, 8 aa, Artificial sequence
  VH CDR1
GFTFNNYA

SEQ ID NO: 1480 - protein, 8 aa, Artificial sequence
  VH CDR1
GFVFSNYW

SEQ ID NO: 1481 - protein, 10 aa, Artificial sequence
  VH CDR1
GGSISSGGYY

SEQ ID NO: 1482 - protein, 8 aa, Artificial sequence
  VH CDR1
GYNFNNYW

SEQ ID NO: 1483 - protein, 8 aa, Artificial sequence
  VH CDR1
GYTFTSYA

SEQ ID NO: 1484 - protein, 8 aa, Artificial sequence
  VH CDR1
GYTLTELS

SEQ ID NO: 1485 - protein, 8 aa, Artificial sequence
  VH CDR1
GFTFSSYG

SEQ ID NO: 1486 - protein, 8 aa, Artificial sequence
  VH CDR1
GFTFSSYP

SEQ ID NO: 1487 - protein, 10 aa, Artificial sequence
  VH CDR1
GGSISSGGYY

SEQ ID NO: 1488 - protein, 10 aa, Artificial sequence
  VH CDR1
GGSISSGGYY

SEQ ID NO: 1489 - protein, 8 aa, Artificial sequence
  VH CDR1
GFTVSSNY

SEQ ID NO: 1490 - protein, 8 aa, Artificial sequence
  VH CDR1
GGSISSYY

SEQ ID NO: 1491 - protein, 8 aa, Artificial sequence
  VH CDR1
GYTFTGYF

SEQ ID NO: 1492 - protein, 8 aa, Artificial sequence
  VH CDR1
GFTASSNY

SEQ ID NO: 1493 - protein, 8 aa, Artificial sequence
  VH CDR1
GGTFSSYG

SEQ ID NO: 1494 - protein, 8 aa, Artificial sequence
  VH CDR1
GGRFGSFA

SEQ ID NO: 1495 - protein, 8 aa, Artificial sequence
  VH CDR1
GFTFTDYA

SEQ ID NO: 1496 - protein, 8 aa, Artificial sequence
  VH CDR1
GGSISSYY

SEQ ID NO: 1497 - protein, 8 aa, Artificial sequence
  VH CDR1
GYTFTDYY

SEQ ID NO: 1498 - protein, 8 aa, Artificial sequence
  VH CDR1
GYSFTGHY

SEQ ID NO: 1499 - protein, 8 aa, Artificial sequence
  VH CDR1
GFTFSNYG

SEQ ID NO: 1500 - protein, 10 aa, Artificial sequence
  VH CDR1
GGSISSDVYS

SEQ ID NO: 1501 - protein, 8 aa, Artificial sequence
  VH CDR1
GDTFNSYA

SEQ ID NO: 1502 - protein, 8 aa, Artificial sequence
  VH CDR1
GFTFSHYG

SEQ ID NO: 1503 - protein, 8 aa, Artificial sequence
  VH CDR1
GYSFPAHW

SEQ ID NO: 1504 - protein, 8 aa, Artificial sequence
  VH CDR1
GYNFDTYW

SEQ ID NO: 1505 - protein, 8 aa, Artificial sequence
  VH CDR1
GYSFSGYW

SEQ ID NO: 1506 - protein, 8 aa, Artificial sequence
  VH CDR1
GYYFAAHW

SEQ ID NO: 1507 - protein, 8 aa, Artificial sequence
  VH CDR1
GYSFPAFW

SEQ ID NO: 1508 - protein, 8 aa, Artificial sequence
  VH CDR1
GYSFPAYW

SEQ ID NO: 1509 - protein, 8 aa, Artificial sequence
  VH CDR1
GYTLTELS

SEQ ID NO: 1510 - protein, 8 aa, Artificial sequence
  VH CDR1
GYTFTRYW

SEQ ID NO: 1511 - protein, 8 aa, Artificial sequence
  VH CDR1
GFTFSSYS

SEQ ID NO: 1512 - protein, 8 aa, Artificial sequence
  VH CDR1
GFTFSSYS

SEQ ID NO: 1513 - protein, 10 aa, Artificial sequence
  VH CDR1
GGSISSSSYY

SEQ ID NO: 1514 - protein, 10 aa, Artificial sequence
  VH CDR1
GFSLSTSGVG

SEQ ID NO: 1515 - protein, 8 aa, Artificial sequence
  VH CDR1
GFTFSNAW

SEQ ID NO: 1516 - protein, 8 aa, Artificial sequence
  VH CDR1
GFTFSSYE

SEQ ID NO: 1517 - protein, 8 aa, Artificial sequence
  VH CDR1
GFTFSSYE

SEQ ID NO: 1518 - protein, 10 aa, Artificial sequence
  VH CDR1
GGSISSSSYY

SEQ ID NO: 1519 - protein, 10 aa, Artificial sequence
  VH CDR1
GGSISSGGYY

SEQ ID NO: 1520 - protein, 10 aa, Artificial sequence
  VH CDR1
GGSISSRSYY

SEQ ID NO: 1521 - protein, 10 aa, Artificial sequence
  VH CDR1
GFSLSNARMG

SEQ ID NO: 1522 - protein, 10 aa, Artificial sequence
  VH CDR1
GFSLSTSGVG

SEQ ID NO: 1523 - protein, 8 aa, Artificial sequence
  VH CDR1
GFTISPYG

SEQ ID NO: 1524 - protein, 8 aa, Artificial sequence
  VH CDR1
GFTISPYG

SEQ ID NO: 1525 - protein, 8 aa, Artificial sequence
  VH CDR1
GYTFGDYG

SEQ ID NO: 1526 - protein, 8 aa, Artificial sequence
  VH CDR1
GYTFGDYG

SEQ ID NO: 1527 - protein, 10 aa, Artificial sequence
  VH CDR1
GFSLSTSGVG

SEQ ID NO: 1528 - protein, 8 aa, Artificial sequence
  VH CDR1
GGSISTYR

SEQ ID NO: 1529 - protein, 8 aa, Artificial sequence
  VH CDR1
GFTFSNAW

SEQ ID NO: 1530 - protein, 8 aa, Artificial sequence
  VH CDR1
GYIFTNYA

SEQ ID NO: 1531 - protein, 8 aa, Artificial sequence
  VH CDR1
GYAFTSYQ

SEQ ID NO: 1532 - protein, 8 aa, Artificial sequence
  VH CDR1
GFTFGDYA

SEQ ID NO: 1533 - protein, 8 aa, Artificial sequence
  VH CDR1
GASFSSYY

SEQ ID NO: 1534 - protein, 8 aa, Artificial sequence
  VH CDR1
GYSFTKYW

SEQ ID NO: 1535 - protein, 8 aa, Artificial sequence
  VH CDR1
GFTFSSYA

SEQ ID NO: 1536 - protein, 10 aa, Artificial sequence
  VH CDR1
GDSVSSNTVA

SEQ ID NO: 1537 - protein, 8 aa, Artificial sequence
  VH CDR1
GFTFDDYG

SEQ ID NO: 1538 - protein, 8 aa, Artificial sequence
  VH CDR1
GFAFDDFA

SEQ ID NO: 1539 - protein, 8 aa, Artificial sequence
  VH CDR1
GFTVSSTF

SEQ ID NO: 1540 - protein, 10 aa, Artificial sequence
  VH CDR1
GGSIKRRGYY

SEQ ID NO: 1541 - protein, 8 aa, Artificial sequence
  VH CDR1
GGSFSAYY

SEQ ID NO: 1542 - protein, 10 aa, Artificial sequence
  VH CDR1
GGSISSSDYY

SEQ ID NO: 1543 - protein, 8 aa, Artificial sequence
  VH CDR1
GFTFSNAW

SEQ ID NO: 1544 - protein, 8 aa, Artificial sequence
  VH CDR1
GGTFSTYA

SEQ ID NO: 1545 - protein, 8 aa, Artificial sequence
  VH CDR1
GLRFTDAW

SEQ ID NO: 1546 - protein, 8 aa, Artificial sequence
  VH CDR1
GFSFSSYA

SEQ ID NO: 1547 - protein, 8 aa, Artificial sequence
  VH CDR1
GFSFSDFA

SEQ ID NO: 1548 - protein, 8 aa, Artificial sequence
  VH CDR1
GFTFTTYG

SEQ ID NO: 1549 - protein, 8 aa, Artificial sequence
  VH CDR1
GFTFRSYS

SEQ ID NO: 1550 - protein, 8 aa, Artificial sequence
  VH CDR1
GDSITSYY

SEQ ID NO: 1551 - protein, 8 aa, Artificial sequence
  VH CDR1
GGSFSGSY

SEQ ID NO: 1552 - protein, 8 aa, Artificial sequence
  VH CDR1
GGSFTDHY

SEQ ID NO: 1553 - protein, 10 aa, Artificial sequence
  VH CDR1
GGSISSSSYY

SEQ ID NO: 1554 - protein, 10 aa, Artificial sequence
  VH CDR1
GFSLSNARMG

SEQ ID NO: 1555 - protein, 8 aa, Artificial sequence
  VH CDR1
GFTFSSYG

SEQ ID NO: 1556 - protein, 8 aa, Artificial sequence
  VH CDR1
GFTFGDYA

SEQ ID NO: 1557 - protein, 8 aa, Artificial sequence
  VH CDR1
GFTFSGSA

SEQ ID NO: 1558 - protein, 8 aa, Artificial sequence
  VH CDR1
GYSFTSYW

SEQ ID NO: 1559 - protein, 8 aa, Artificial sequence
  VH CDR1
GYTFTSYY

SEQ ID NO: 1560 - protein, 8 aa, Artificial sequence
  VH CDR1
GGTFSSYA

SEQ ID NO: 1561 - protein, 8 aa, Artificial sequence
  VH CDR1
GFTFSNAW

SEQ ID NO: 1562 - protein, 8 aa, Artificial sequence
  VH CDR1
GFTFRSYW

SEQ ID NO: 1563 - protein, 8 aa, Artificial sequence
  VH CDR1
GFTFSTYA

SEQ ID NO: 1564 - protein, 8 aa, Artificial sequence
  VH CDR1
GFTFSSYG

SEQ ID NO: 1565 - protein, 8 aa, Artificial sequence
  VH CDR1
GFTVSSNY

SEQ ID NO: 1566 - protein, 10 aa, Artificial sequence
  VH CDR1
GGPISSGGYY

SEQ ID NO: 1567 - protein, 10 aa, Artificial sequence
  VH CDR1
GGSISSSYYY

SEQ ID NO: 1568 - protein, 10 aa, Artificial sequence
  VH CDR1
GGSISSSSYY

SEQ ID NO: 1569 - protein, 8 aa, Artificial sequence
  VH CDR1
GFTFSSYS

SEQ ID NO: 1570 - protein, 8 aa, Artificial sequence
  VH CDR1
GYTFTSYG

SEQ ID NO: 1571 - protein, 8 aa, Artificial sequence
  VH CDR1
GFTFSSYW

SEQ ID NO: 1572 - protein, 10 aa, Artificial sequence
  VH CDR1
GGSISSGGYS

SEQ ID NO: 1573 - protein, 8 aa, Artificial sequence
  VH CDR1
GYSFPAHW

SEQ ID NO: 1574 - protein, 8 aa, Artificial sequence
  VH CDR1
GYSFPAFY

SEQ ID NO: 1575 - protein, 8 aa, Artificial sequence
  VH CDR1
GYSFPAHW

SEQ ID NO: 1576 - protein, 8 aa, Artificial sequence
  VH CDR1
GFTFSASA

SEQ ID NO: 1577 - protein, 10 aa, Artificial sequence
  VH CDR1
GGSISSGGYY

SEQ ID NO: 1578 - protein, 8 aa, Artificial sequence
  VH CDR1
GFTFSSYW

SEQ ID NO: 1579 - protein, 8 aa, Artificial sequence
  VH CDR1
GYTFTSYG

SEQ ID NO: 1580 - protein, 10 aa, Artificial sequence
  VH CDR1
GFSLSTSGVS

SEQ ID NO: 1581 - protein, 8 aa, Artificial sequence
  VH CDR1
GFTFSSYG

SEQ ID NO: 1582 - protein, 8 aa, Artificial sequence
  VH CDR1
GFTFSSYA

SEQ ID NO: 1583 - protein, 8 aa, Artificial sequence
  VH CDR1
GFTFSSYE

SEQ ID NO: 1584 - protein, 8 aa, Artificial sequence
  VH CDR1
GFTFSIYA

SEQ ID NO: 1585 - protein, 8 aa, Artificial sequence
  VH CDR1
GFTFTSYG

SEQ ID NO: 1586 - protein, 8 aa, Artificial sequence
  VH CDR1
GFTFSSYG

SEQ ID NO: 1587 - protein, 8 aa, Artificial sequence
  VH CDR1
GFAFNKYG

SEQ ID NO: 1588 - protein, 8 aa, Artificial sequence
  VH CDR1
GFTFSSYG

SEQ ID NO: 1589 - protein, 10 aa, Artificial sequence
  VH CDR1
GGSISSSSYY

SEQ ID NO: 1590 - protein, 10 aa, Artificial sequence
  VH CDR1
GGAITTSSYF

SEQ ID NO: 1591 - protein, 8 aa, Artificial sequence
  VH CDR1
GFTFSAYG

SEQ ID NO: 1592 - protein, 8 aa, Artificial sequence
  VH CDR1
GFTFNNYG

SEQ ID NO: 1593 - protein, 8 aa, Artificial sequence
  VH CDR1
GGSINSYY

SEQ ID NO: 1594 - protein, 8 aa, Artificial sequence
  VH CDR1
GFTFSRFG

SEQ ID NO: 1595 - protein, 8 aa, Artificial sequence
  VH CDR1
GFTFSRFG

SEQ ID NO: 1596 - protein, 8 aa, Artificial sequence
  VH CDR1
GFTFSSFW

SEQ ID NO: 1597 - protein, 8 aa, Artificial sequence
  VH CDR1
GGTFSSYT

SEQ ID NO: 1598 - protein, 8 aa, Artificial sequence
  VH CDR1
GGSFSSYT

SEQ ID NO: 1599 - protein, 10 aa, Artificial sequence
  VH CDR1
EFSLDSRGVG

SEQ ID NO: 1600 - protein, 8 aa, Artificial sequence
  VH CDR1
GGSISSYY

SEQ ID NO: 1601 - protein, 8 aa, Artificial sequence
  VH CDR1
GFTFSRYG

SEQ ID NO: 1602 - protein, 8 aa, Artificial sequence
  VH CDR1
GFPFSGYA

SEQ ID NO: 1603 - protein, 8 aa, Artificial sequence
  VH CDR1
GFTFINYD

SEQ ID NO: 1604 - protein, 8 aa, Artificial sequence
  VH CDR1
GFAFDKFW

SEQ ID NO: 1605 - protein, 10 aa, Artificial sequence
  VH CDR1
GGSINRDGHY

SEQ ID NO: 1606 - protein, 8 aa, Artificial sequence
  VH CDR1
GGSISSYY

SEQ ID NO: 1607 - protein, 10 aa, Artificial sequence
  VH CDR1
GGSVSSGSYF

SEQ ID NO: 1608 - protein, 8 aa, Artificial sequence
  VH CDR1
GYTFTSYG

SEQ ID NO: 1609 - protein, 8 aa, Artificial sequence
  VH CDR1
GYTFTGYY

SEQ ID NO: 1610 - protein, 8 aa, Artificial sequence
  VH CDR1
GYTLTELS

SEQ ID NO: 1611 - protein, 8 aa, Artificial sequence
  VH CDR1
GYRFTSYG

SEQ ID NO: 1612 - protein, 8 aa, Artificial sequence
  VH CDR1
GYRFTSYG

SEQ ID NO: 1613 - protein, 8 aa, Artificial sequence
  VH CDR1
GYTFTSYA

SEQ ID NO: 1614 - protein, 8 aa, Artificial sequence
  VH CDR1
GYTFTSYY

SEQ ID NO: 1615 - protein, 8 aa, Artificial sequence
  VH CDR1
GYTFTNYY

SEQ ID NO: 1616 - protein, 8 aa, Artificial sequence
  VH CDR1
GGTFSSYT

SEQ ID NO: 1617 - protein, 8 aa, Artificial sequence
  VH CDR1
GGTFNSYA

SEQ ID NO: 1618 - protein, 8 aa, Artificial sequence
  VH CDR1
GYTFTSSD

SEQ ID NO: 1619 - protein, 10 aa, Artificial sequence
  VH CDR1
EFSLDARGVG

SEQ ID NO: 1620 - protein, 8 aa, Artificial sequence
  VH CDR1
GFTFISYA

SEQ ID NO: 1621 - protein, 8 aa, Artificial sequence
  VH CDR1
GFTFSSYA

SEQ ID NO: 1622 - protein, 8 aa, Artificial sequence
  VH CDR1
GFTFSSYG

SEQ ID NO: 1623 - protein, 8 aa, Artificial sequence
  VH CDR1
GFTFSSHG

SEQ ID NO: 1624 - protein, 8 aa, Artificial sequence
  VH CDR1
GFTFSSYA

SEQ ID NO: 1625 - protein, 8 aa, Artificial sequence
  VH CDR1
GFTFSSYA

SEQ ID NO: 1626 - protein, 8 aa, Artificial sequence
  VH CDR1
GFTFSTYG

SEQ ID NO: 1627 - protein, 8 aa, Artificial sequence
  VH CDR1
GFTFSTFA

SEQ ID NO: 1628 - protein, 8 aa, Artificial sequence
  VH CDR1
GFIFGDYA

SEQ ID NO: 1629 - protein, 8 aa, Artificial sequence
  VH CDR1
GFIFGDYA

SEQ ID NO: 1630 - protein, 8 aa, Artificial sequence
  VH CDR1
GFTFSSYW

SEQ ID NO: 1631 - protein, 10 aa, Artificial sequence
  VH CDR1
GASISSGDYY

SEQ ID NO: 1632 - protein, 8 aa, Artificial sequence
  VH CDR1
GGVLSDYY

SEQ ID NO: 1633 - protein, 8 aa, Artificial sequence
  VH CDR1
GGVLSDYY

SEQ ID NO: 1634 - protein, 8 aa, Artificial sequence
  VH CDR1
GGSFSDYY

SEQ ID NO: 1635 - protein, 8 aa, Artificial sequence
  VH CDR1
GGSFSDYF

SEQ ID NO: 1636 - protein, 9 aa, Artificial sequence
  VH CDR1
GDSISSNNW

SEQ ID NO: 1637 - protein, 8 aa, Artificial sequence
  VH CDR1
GGSISSYY

SEQ ID NO: 1638 - protein, 8 aa, Artificial sequence
  VH CDR1
GDSISSYY

SEQ ID NO: 1639 - protein, 8 aa, Artificial sequence
  VH CDR1
GGSISGYY

SEQ ID NO: 1640 - protein, 10 aa, Artificial sequence
  VH CDR1
GGSISSGSYY

SEQ ID NO: 1641 - protein, 10 aa, Artificial sequence
  VH CDR1
DDSISSGSYY

SEQ ID NO: 1642 - protein, 8 aa, Artificial sequence
  VH CDR1
GYSFTSYW

SEQ ID NO: 1643 - protein, 8 aa, Artificial sequence
  VH CDR1
GYSFTSYW

SEQ ID NO: 1644 - protein, 8 aa, Artificial sequence
  VH CDR1
GYTFTSYA

SEQ ID NO: 1645 - protein, 8 aa, Artificial sequence
  VH CDR1
GYTFSFYW

SEQ ID NO: 1646 - protein, 10 aa, Artificial sequence
  VH CDR1
GGAFSSGRHY

SEQ ID NO: 1647 - protein, 8 aa, Artificial sequence
  VH CDR1
GGSFSSYY

SEQ ID NO: 1648 - protein, 8 aa, Artificial sequence
  VH CDR1
GYTLTELS

SEQ ID NO: 1649 - protein, 8 aa, Artificial sequence
  VH CDR1
GFTFSDYY

SEQ ID NO: 1650 - protein, 8 aa, Artificial sequence
  VH CDR1
GITVSSNY

SEQ ID NO: 1651 - protein, 8 aa, Artificial sequence
  VH CDR1
GFTFSRFW

SEQ ID NO: 1652 - protein, 8 aa, Artificial sequence
  VH CDR1
GFTFSNYW

SEQ ID NO: 1653 - protein, 8 aa, Artificial sequence
  VH CDR1
AFSFHLHG

SEQ ID NO: 1654 - protein, 8 aa, Artificial sequence
  VH CDR1
GFTFSSYA

SEQ ID NO: 1655 - protein, 8 aa, Artificial sequence
  VH CDR1
GFIFDDYG

SEQ ID NO: 1656 - protein, 8 aa, Artificial sequence
  VH CDR1
GFTVSSNY

SEQ ID NO: 1657 - protein, 10 aa, Artificial sequence
  VH CDR1
GGSIGSSSYF

SEQ ID NO: 1658 - protein, 10 aa, Artificial sequence
  VH CDR1
GGSISSSSYY

SEQ ID NO: 1659 - protein, 8 aa, Artificial sequence
  VH CDR1
GFTFSSYD

SEQ ID NO: 1660 - protein, 8 aa, Artificial sequence
  VH CDR1
GFTFSRSA

SEQ ID NO: 1661 - protein, 8 aa, Artificial sequence
  VH CDR1
GFTFSSQS

SEQ ID NO: 1662 - protein, 8 aa, Artificial sequence
  VH CDR1
GFTFEEYS

SEQ ID NO: 1663 - protein, 8 aa, Artificial sequence
  VH CDR1
GYTFGRYW

SEQ ID NO: 1664 - protein, 8 aa, Artificial sequence
  VH CDR1
GYTFSTYY

SEQ ID NO: 1665 - protein, 8 aa, Artificial sequence
  VH CDR1
GGTFSSYA

SEQ ID NO: 1666 - protein, 8 aa, Artificial sequence
  VH CDR1
GATFTTYA

SEQ ID NO: 1667 - protein, 8 aa, Artificial sequence
  VH CDR1
GFTLSSYA

SEQ ID NO: 1668 - protein, 8 aa, Artificial sequence
  VH CDR1
GFTFSNYD

SEQ ID NO: 1669 - protein, 8 aa, Artificial sequence
  VH CDR1
GFTFDDYA

SEQ ID NO: 1670 - protein, 8 aa, Artificial sequence
  VH CDR1
GFTFDDYA

SEQ ID NO: 1671 - protein, 8 aa, Artificial sequence
  VH CDR1
GFTFDDYA

SEQ ID NO: 1672 - protein, 8 aa, Artificial sequence
  VH CDR1
GFTFSSYT

SEQ ID NO: 1673 - protein, 8 aa, Artificial sequence
  VH CDR1
TFIFSNSE

SEQ ID NO: 1674 - protein, 8 aa, Artificial sequence
  VH CDR1
GFTVSSNY

SEQ ID NO: 1675 - protein, 8 aa, Artificial sequence
  VH CDR1
GGSFSGYF

SEQ ID NO: 1676 - protein, 8 aa, Artificial sequence
  VH CDR1
GGSFSGYY

SEQ ID NO: 1677 - protein, 8 aa, Artificial sequence
  VH CDR1
GGSLSSYY

SEQ ID NO: 1678 - protein, 8 aa, Artificial sequence
  VH CDR1
GGSISTFY

SEQ ID NO: 1679 - protein, 8 aa, Artificial sequence
  VH CDR1
GGSVSSYF

SEQ ID NO: 1680 - protein, 10 aa, Artificial sequence
  VH CDR1
GFSFNTPGVG

SEQ ID NO: 1681 - protein, 8 aa, Artificial sequence
  VH CDR1
GFSFSNHG

SEQ ID NO: 1682 - protein, 8 aa, Artificial sequence
  VH CDR1
GFTFSNSA

SEQ ID NO: 1683 - protein, 8 aa, Artificial sequence
  VH CDR1
EFTFSSYE

SEQ ID NO: 1684 - protein, 8 aa, Artificial sequence
  VH CDR1
GYTFTNFA

SEQ ID NO: 1685 - protein, 8 aa, Artificial sequence
  VH CDR1
GYTFTSYG

SEQ ID NO: 1686 - protein, 8 aa, Artificial sequence
  VH CDR1
GFSFSRYG

SEQ ID NO: 1687 - protein, 8 aa, Artificial sequence
  VH CDR1
GFNFNSYT

SEQ ID NO: 1688 - protein, 8 aa, Artificial sequence
  VH CDR1
GFNFNSYT

SEQ ID NO: 1689 - protein, 8 aa, Artificial sequence
  VH CDR1
GFTFSSYE

SEQ ID NO: 1690 - protein, 8 aa, Artificial sequence
  VH CDR1
GYIFTSYG

SEQ ID NO: 1691 - protein, 8 aa, Artificial sequence
  VH CDR1
GYSFNDYG

SEQ ID NO: 1692 - protein, 8 aa, Artificial sequence
  VH CDR1
GYTLTELS

SEQ ID NO: 1693 - protein, 8 aa, Artificial sequence
  VH CDR1
GNTFSTYY

SEQ ID NO: 1694 - protein, 8 aa, Artificial sequence
  VH CDR1
GFTFSDVW

SEQ ID NO: 1695 - protein, 8 aa, Artificial sequence
  VH CDR1
GLTFDNAW

SEQ ID NO: 1696 - protein, 8 aa, Artificial sequence
  VH CDR1
RFTFSSYA

SEQ ID NO: 1697 - protein, 8 aa, Artificial sequence
  VH CDR1
GFTFDDYA

SEQ ID NO: 1698 - protein, 8 aa, Artificial sequence
  VH CDR1
GNTFTTYY

SEQ ID NO: 1699 - protein, 8 aa, Artificial sequence
  VH CDR1
GGTFNSYT

SEQ ID NO: 1700 - protein, 10 aa, Artificial sequence
  VH CDR1
GFSLNTPGAG

SEQ ID NO: 1701 - protein, 10 aa, Artificial sequence
  VH CDR1
GFSFNTPGVG

SEQ ID NO: 1702 - protein, 10 aa, Artificial sequence
  VH CDR1
GFTFTFSDYY

SEQ ID NO: 1703 - protein, 8 aa, Artificial sequence
  VH CDR1
GFTFSDYY

SEQ ID NO: 1704 - protein, 8 aa, Artificial sequence
  VH CDR1
GFSFSRYG

SEQ ID NO: 1705 - protein, 8 aa, Artificial sequence
  VH CDR1
GLSFSRYG

SEQ ID NO: 1706 - protein, 8 aa, Artificial sequence
  VH CDR1
GFSFNNFG

SEQ ID NO: 1707 - protein, 8 aa, Artificial sequence
  VH CDR1
GFTLSSYA

SEQ ID NO: 1708 - protein, 8 aa, Artificial sequence
  VH CDR1
GFTFSSYE

SEQ ID NO: 1709 - protein, 8 aa, Artificial sequence
  VH CDR1
GFTFSSYA

SEQ ID NO: 1710 - protein, 8 aa, Artificial sequence
  VH CDR1
GGSISPYS

SEQ ID NO: 1711 - protein, 10 aa, Artificial sequence
  VH CDR1
GDSIRSSSFY

SEQ ID NO: 1712 - protein, 8 aa, Artificial sequence
  VH CDR1
GYSFTTYA

SEQ ID NO: 1713 - protein, 8 aa, Artificial sequence
  VH CDR1
GGTFSSYA

SEQ ID NO: 1714 - protein, 8 aa, Artificial sequence
  VH CDR1
GGTFSSYA

SEQ ID NO: 1715 - protein, 8 aa, Artificial sequence
  VH CDR1
GFTFSHAW

SEQ ID NO: 1716 - protein, 8 aa, Artificial sequence
  VH CDR1
GFTFSSYE

SEQ ID NO: 1717 - protein, 8 aa, Artificial sequence
  VH CDR1
GFTVSSNY

SEQ ID NO: 1718 - protein, 8 aa, Artificial sequence
  VH CDR1
GGSISSYY

SEQ ID NO: 1719 - protein, 8 aa, Artificial sequence
  VH CDR1
GYTFTTYG

SEQ ID NO: 1720 - protein, 8 aa, Artificial sequence
  VH CDR1
GYTFTNYG

SEQ ID NO: 1721 - protein, 8 aa, Artificial sequence
  VH CDR1
GYTLTELS

SEQ ID NO: 1722 - protein, 8 aa, Artificial sequence
  VH CDR1
GYTLTELS

SEQ ID NO: 1723 - protein, 8 aa, Artificial sequence
  VH CDR1
GYTLTELS

SEQ ID NO: 1724 - protein, 8 aa, Artificial sequence
  VH CDR1
GYTLTELS

SEQ ID NO: 1725 - protein, 8 aa, Artificial sequence
  VH CDR1
GYTFTSYA

SEQ ID NO: 1726 - protein, 8 aa, Artificial sequence
  VH CDR1
GGTFSSYA

SEQ ID NO: 1727 - protein, 10 aa, Artificial sequence
  VH CDR1
GFSLSNARMG

SEQ ID NO: 1728 - protein, 10 aa, Artificial sequence
  VH CDR1
GFSLSTTGVG

SEQ ID NO: 1729 - protein, 10 aa, Artificial sequence
  VH CDR1
GFSLSTSGVG

SEQ ID NO: 1730 - protein, 8 aa, Artificial sequence
  VH CDR1
GFTFSSYS

SEQ ID NO: 1731 - protein, 8 aa, Artificial sequence
  VH CDR1
GFTFSSYS

SEQ ID NO: 1732 - protein, 8 aa, Artificial sequence
  VH CDR1
GFTFSSYA

SEQ ID NO: 1733 - protein, 8 aa, Artificial sequence
  VH CDR1
GFTFSSYA

SEQ ID NO: 1734 - protein, 8 aa, Artificial sequence
  VH CDR1
GFTFSSYA

SEQ ID NO: 1735 - protein, 8 aa, Artificial sequence
  VH CDR1
GFTFGSYG

SEQ ID NO: 1736 - protein, 8 aa, Artificial sequence
  VH CDR1
GFTFSSYA

SEQ ID NO: 1737 - protein, 8 aa, Artificial sequence
  VH CDR1
GFTFSIYA

SEQ ID NO: 1738 - protein, 8 aa, Artificial sequence
  VH CDR1
GFTVSSNY

SEQ ID NO: 1739 - protein, 8 aa, Artificial sequence
  VH CDR1
GFTFSNYW

SEQ ID NO: 1740 - protein, 8 aa, Artificial sequence
  VH CDR1
GGSFSGYY

SEQ ID NO: 1741 - protein, 8 aa, Artificial sequence
  VH CDR1
DGSFSGHY

SEQ ID NO: 1742 - protein, 8 aa, Artificial sequence
  VH CDR1
GGSFSGYY

SEQ ID NO: 1743 - protein, 8 aa, Artificial sequence
  VH CDR1
GGSISSYY

SEQ ID NO: 1744 - protein, 8 aa, Artificial sequence
  VH CDR1
GGSISSYY

SEQ ID NO: 1745 - protein, 8 aa, Artificial sequence
  VH CDR1
GYNFTSYW

SEQ ID NO: 1746 - protein, 8 aa, Artificial sequence
  VH CDR1
GYTFTSYA

SEQ ID NO: 1747 - protein, 8 aa, Artificial sequence
  VH CDR1
GFTVSSNY

SEQ ID NO: 1748 - protein, 10 aa, Artificial sequence
  VH CDR1
GGSISSGLYH

SEQ ID NO: 1749 - protein, 8 aa, Artificial sequence
  VH CDR1
GGTFSSYT

SEQ ID NO: 1750 - protein, 8 aa, Artificial sequence
  VH CDR1
GFTFGRHG

SEQ ID NO: 1751 - protein, 8 aa, Artificial sequence
  VH CDR1
GFTFGRYG

SEQ ID NO: 1752 - protein, 10 aa, Artificial sequence
  VH CDR1
GFSLTTRGEG

SEQ ID NO: 1753 - protein, 8 aa, Artificial sequence
  VH CDR1
GYTFTFYT

SEQ ID NO: 1754 - protein, 8 aa, Artificial sequence
  VH CDR1
GFTFTSSA

SEQ ID NO: 1755 - protein, 10 aa, Artificial sequence
  VH CDR1
GFSLSTSGMC

SEQ ID NO: 1756 - protein, 8 aa, Artificial sequence
  VH CDR1
GFTFTTYA

SEQ ID NO: 1757 - protein, 8 aa, Artificial sequence
  VH CDR1
GFAFTTYA

SEQ ID NO: 1758 - protein, 8 aa, Artificial sequence
  VH CDR1
GYTFTSYG

SEQ ID NO: 1759 - protein, 8 aa, Artificial sequence
  VH CDR1
GYTFSRYG

SEQ ID NO: 1760 - protein, 8 aa, Artificial sequence
  VH CDR1
GYTFTGYY

SEQ ID NO: 1761 - protein, 10 aa, Artificial sequence
  VH CDR1
GSGFTFRNAW

SEQ ID NO: 1762 - protein, 8 aa, Artificial sequence
  VH CDR1
GFTFNFYG

SEQ ID NO: 1763 - protein, 8 aa, Artificial sequence
  VH CDR1
GFTFDDYA

SEQ ID NO: 1764 - protein, 8 aa, Artificial sequence
  VH CDR1
GFIFDDYT

SEQ ID NO: 1765 - protein, 8 aa, Artificial sequence
  VH CDR1
GYTFTSYG

SEQ ID NO: 1766 - protein, 8 aa, Artificial sequence
  VH CDR1
GYTFTSYG

SEQ ID NO: 1767 - protein, 8 aa, Artificial sequence
  VH CDR1
GDTFNDYH

SEQ ID NO: 1768 - protein, 8 aa, Artificial sequence
  VH CDR1
GGTFSSYA

SEQ ID NO: 1769 - protein, 8 aa, Artificial sequence
  VH CDR1
GGTFSSYA

SEQ ID NO: 1770 - protein, 8 aa, Artificial sequence
  VH CDR1
GFTFSNAW

SEQ ID NO: 1771 - protein, 8 aa, Artificial sequence
  VH CDR1
GLTFTKAW

SEQ ID NO: 1772 - protein, 8 aa, Artificial sequence
  VH CDR1
GFTFSTYA

SEQ ID NO: 1773 - protein, 8 aa, Artificial sequence
  VH CDR1
GFTFSNYA

SEQ ID NO: 1774 - protein, 8 aa, Artificial sequence
  VH CDR1
GFTFSSYA

SEQ ID NO: 1775 - protein, 8 aa, Artificial sequence
  VH CDR1
GFTFSSYG

SEQ ID NO: 1776 - protein, 8 aa, Artificial sequence
  VH CDR1
GFTFSSYG

SEQ ID NO: 1777 - protein, 8 aa, Artificial sequence
  VH CDR1
GFTFSSFA

SEQ ID NO: 1778 - protein, 8 aa, Artificial sequence
  VH CDR1
GFTFSNYG

SEQ ID NO: 1779 - protein, 8 aa, Artificial sequence
  VH CDR1
GFTFSSYG

SEQ ID NO: 1780 - protein, 8 aa, Artificial sequence
  VH CDR1
GFTFSSYA

SEQ ID NO: 1781 - protein, 8 aa, Artificial sequence
  VH CDR1
GFTFHDYA

SEQ ID NO: 1782 - protein, 8 aa, Artificial sequence
  VH CDR1
GVIVSRNY

SEQ ID NO: 1783 - protein, 8 aa, Artificial sequence
  VH CDR1
GFTVSSNY

SEQ ID NO: 1784 - protein, 8 aa, Artificial sequence
  VH CDR1
EFTVSSNY

SEQ ID NO: 1785 - protein, 8 aa, Artificial sequence
  VH CDR1
GFTVSSNY

SEQ ID NO: 1786 - protein, 8 aa, Artificial sequence
  VH CDR1
GFTVSSNY

SEQ ID NO: 1787 - protein, 8 aa, Artificial sequence
  VH CDR1
GITVSSNY

SEQ ID NO: 1788 - protein, 8 aa, Artificial sequence
  VH CDR1
GFTVSSNY

SEQ ID NO: 1789 - protein, 8 aa, Artificial sequence
  VH CDR1
GFTFSSYW

SEQ ID NO: 1790 - protein, 10 aa, Artificial sequence
  VH CDR1
GGSISSGGYY

SEQ ID NO: 1791 - protein, 10 aa, Artificial sequence
  VH CDR1
GGSISSGGYY

SEQ ID NO: 1792 - protein, 8 aa, Artificial sequence
  VH CDR1
GGSFSGYY

SEQ ID NO: 1793 - protein, 8 aa, Artificial sequence
  VH CDR1
GGSFSDDF

SEQ ID NO: 1794 - protein, 8 aa, Artificial sequence
  VH CDR1
GGSISSYY

SEQ ID NO: 1795 - protein, 8 aa, Artificial sequence
  VH CDR1
GYSFTSYW

SEQ ID NO: 1796 - protein, 8 aa, Artificial sequence
  VH CDR1
GDTFSNYP

SEQ ID NO: 1797 - protein, 8 aa, Artificial sequence
  VH CDR1
GFTFSTSA

SEQ ID NO: 1798 - protein, 8 aa, Artificial sequence
  VH CDR1
GFTFSTYA

SEQ ID NO: 1799 - protein, 8 aa, Artificial sequence
  VH CDR1
GFTFFSYA

SEQ ID NO: 1800 - protein, 8 aa, Artificial sequence
  VH CDR1
GFTVSSNY

SEQ ID NO: 1801 - protein, 10 aa, Artificial sequence
  VH CDR1
AGSISSDTYY

SEQ ID NO: 1802 - protein, 8 aa, Artificial sequence
  VH CDR1
GYTFTSYG

SEQ ID NO: 1803 - protein, 8 aa, Artificial sequence
  VH CDR1
GYTFTNYY

SEQ ID NO: 1804 - protein, 8 aa, Artificial sequence
  VH CDR1
GGTFSSYT

SEQ ID NO: 1805 - protein, 10 aa, Artificial sequence
  VH CDR1
GFSLSTSGVG

SEQ ID NO: 1806 - protein, 8 aa, Artificial sequence
  VH CDR1
GFTVSSYD

SEQ ID NO: 1807 - protein, 8 aa, Artificial sequence
  VH CDR1
GFTFRNYG

SEQ ID NO: 1808 - protein, 8 aa, Artificial sequence
  VH CDR1
GFTFSSYG

SEQ ID NO: 1809 - protein, 8 aa, Artificial sequence
  VH CDR1
GFTVSRNY

SEQ ID NO: 1810 - protein, 8 aa, Artificial sequence
  VH CDR1
GFTVSSNY

SEQ ID NO: 1811 - protein, 8 aa, Artificial sequence
  VH CDR1
GFTVSRNY

SEQ ID NO: 1812 - protein, 8 aa, Artificial sequence
  VH CDR1
GLTVSSNY

SEQ ID NO: 1813 - protein, 8 aa, Artificial sequence
  VH CDR1
GFTVSSNY

SEQ ID NO: 1814 - protein, 8 aa, Artificial sequence
  VH CDR1
GLIVSSNY

SEQ ID NO: 1815 - protein, 8 aa, Artificial sequence
  VH CDR1
GITVRSNY

SEQ ID NO: 1816 - protein, 8 aa, Artificial sequence
  VH CDR1
GFTVSSNY

SEQ ID NO: 1817 - protein, 8 aa, Artificial sequence
  VH CDR1
GVTVSSNY

SEQ ID NO: 1818 - protein, 8 aa, Artificial sequence
  VH CDR1
GLTVSSNY

SEQ ID NO: 1819 - protein, 8 aa, Artificial sequence
  VH CDR1
GFIVSSNY

SEQ ID NO: 1820 - protein, 8 aa, Artificial sequence
  VH CDR1
EFIVSRNY

SEQ ID NO: 1821 - protein, 8 aa, Artificial sequence
  VH CDR2
IWYDGSNK

SEQ ID NO: 1822 - protein, 8 aa, Artificial sequence
  VH CDR2
IWYDGSNK

SEQ ID NO: 1823 - protein, 8 aa, Artificial sequence
  VH CDR2
IDPSDSYT

SEQ ID NO: 1824 - protein, 8 aa, Artificial sequence
  VH CDR2
IDPSDSYT

SEQ ID NO: 1825 - protein, 8 aa, Artificial sequence
  VH CDR2
IDPSDSYT

SEQ ID NO: 1826 - protein, 8 aa, Artificial sequence
  VH CDR2
IDPSDSYT

SEQ ID NO: 1827 - protein, 8 aa, Artificial sequence
  VH CDR2
IDPSDSYT

SEQ ID NO: 1828 - protein, 7 aa, Artificial sequence
  VH CDR2
ASYTGTT

SEQ ID NO: 1829 - protein, 7 aa, Artificial sequence
  VH CDR2
ASYTGTT

SEQ ID NO: 1830 - protein, 8 aa, Artificial sequence
  VH CDR2
ISAYNGNT

SEQ ID NO: 1831 - protein, 8 aa, Artificial sequence
  VH CDR2
ISSSGTNI

SEQ ID NO: 1832 - protein, 8 aa, Artificial sequence
  VH CDR2
ISSSGTNI

SEQ ID NO: 1833 - protein, 8 aa, Artificial sequence
  VH CDR2
INPYSGET

SEQ ID NO: 1834 - protein, 8 aa, Artificial sequence
  VH CDR2
VNPNDGSS

SEQ ID NO: 1835 - protein, 8 aa, Artificial sequence
  VH CDR2
ISATGGTT

SEQ ID NO: 1836 - protein, 8 aa, Artificial sequence
  VH CDR2
ISSSGTGV

SEQ ID NO: 1837 - protein, 8 aa, Artificial sequence
  VH CDR2
IIPIFGTP

SEQ ID NO: 1838 - protein, 8 aa, Artificial sequence
  VH CDR2
ISYDGSNK

SEQ ID NO: 1839 - protein, 8 aa, Artificial sequence
  VH CDR2
ISSYGDNT

SEQ ID NO: 1840 - protein, 8 aa, Artificial sequence
  VH CDR2
IKQDESEE

SEQ ID NO: 1841 - protein, 7 aa, Artificial sequence
  VH CDR2
IYYSGST

SEQ ID NO: 1842 - protein, 8 aa, Artificial sequence
  VH CDR2
IYGGDSDT

SEQ ID NO: 1843 - protein, 8 aa, Artificial sequence
  VH CDR2
INTNTGNP

SEQ ID NO: 1844 - protein, 8 aa, Artificial sequence
  VH CDR2
FDPEDGET

SEQ ID NO: 1845 - protein, 8 aa, Artificial sequence
  VH CDR2
ISYDGSNK

SEQ ID NO: 1846 - protein, 8 aa, Artificial sequence
  VH CDR2
ISYDGSNK

SEQ ID NO: 1847 - protein, 7 aa, Artificial sequence
  VH CDR2
IYYSGST

SEQ ID NO: 1848 - protein, 7 aa, Artificial sequence
  VH CDR2
IYYSGST

SEQ ID NO: 1849 - protein, 7 aa, Artificial sequence
  VH CDR2
LYSGGNE

SEQ ID NO: 1850 - protein, 7 aa, Artificial sequence
  VH CDR2
IYYSGST

SEQ ID NO: 1851 - protein, 8 aa, Artificial sequence
  VH CDR2
INPSSGVA

SEQ ID NO: 1852 - protein, 7 aa, Artificial sequence
  VH CDR2
IYAGGGT

SEQ ID NO: 1853 - protein, 8 aa, Artificial sequence
  VH CDR2
ILPVLDTT

SEQ ID NO: 1854 - protein, 8 aa, Artificial sequence
  VH CDR2
VTPIVGVP

SEQ ID NO: 1855 - protein, 8 aa, Artificial sequence
  VH CDR2
ISYDGNDK

SEQ ID NO: 1856 - protein, 7 aa, Artificial sequence
  VH CDR2
IYYSGST

SEQ ID NO: 1857 - protein, 8 aa, Artificial sequence
  VH CDR2
VNPNRGGT

SEQ ID NO: 1858 - protein, 8 aa, Artificial sequence
  VH CDR2
INPDSGGT

SEQ ID NO: 1859 - protein, 8 aa, Artificial sequence
  VH CDR2
ITGSGGST

SEQ ID NO: 1860 - protein, 7 aa, Artificial sequence
  VH CDR2
VFHTGSA

SEQ ID NO: 1861 - protein, 8 aa, Artificial sequence
  VH CDR2
IIPILRLA

SEQ ID NO: 1862 - protein, 8 aa, Artificial sequence
  VH CDR2
IWYDGSKK

SEQ ID NO: 1863 - protein, 8 aa, Artificial sequence
  VH CDR2
IFPGDSDT

SEQ ID NO: 1864 - protein, 8 aa, Artificial sequence
  VH CDR2
IYPGDSDS

SEQ ID NO: 1865 - protein, 8 aa, Artificial sequence
  VH CDR2
IFPSDSDT

SEQ ID NO: 1866 - protein, 8 aa, Artificial sequence
  VH CDR2
IFPSDSDT

SEQ ID NO: 1867 - protein, 8 aa, Artificial sequence
  VH CDR2
VFPGDSDT

SEQ ID NO: 1868 - protein, 8 aa, Artificial sequence
  VH CDR2
IFPGDSDT

SEQ ID NO: 1869 - protein, 8 aa, Artificial sequence
  VH CDR2
FDPEDGET

SEQ ID NO: 1870 - protein, 8 aa, Artificial sequence
  VH CDR2
MKPGDGKT

SEQ ID NO: 1871 - protein, 8 aa, Artificial sequence
  VH CDR2
ISSSSSYI

SEQ ID NO: 1872 - protein, 8 aa, Artificial sequence
  VH CDR2
ISSSSSTI

SEQ ID NO: 1873 - protein, 7 aa, Artificial sequence
  VH CDR2
IYYSGST

SEQ ID NO: 1874 - protein, 7 aa, Artificial sequence
  VH CDR2
IYWDDDK

SEQ ID NO: 1875 - protein, 10 aa, Artificial sequence
  VH CDR2
IKSKTDGGTT

SEQ ID NO: 1876 - protein, 8 aa, Artificial sequence
  VH CDR2
ISSSGSTI

SEQ ID NO: 1877 - protein, 8 aa, Artificial sequence
  VH CDR2
ISSSGSTI

SEQ ID NO: 1878 - protein, 7 aa, Artificial sequence
  VH CDR2
IYYSGST

SEQ ID NO: 1879 - protein, 7 aa, Artificial sequence
  VH CDR2
IYYSGST

SEQ ID NO: 1880 - protein, 7 aa, Artificial sequence
  VH CDR2
IYYSGST

SEQ ID NO: 1881 - protein, 7 aa, Artificial sequence
  VH CDR2
IFSNDEK

SEQ ID NO: 1882 - protein, 7 aa, Artificial sequence
  VH CDR2
IYWDDDK

SEQ ID NO: 1883 - protein, 8 aa, Artificial sequence
  VH CDR2
IWYDGSNK

SEQ ID NO: 1884 - protein, 8 aa, Artificial sequence
  VH CDR2
IWYDGSNK

SEQ ID NO: 1885 - protein, 8 aa, Artificial sequence
  VH CDR2
ISGYNGDP

SEQ ID NO: 1886 - protein, 8 aa, Artificial sequence
  VH CDR2
ISGYNGDP

SEQ ID NO: 1887 - protein, 7 aa, Artificial sequence
  VH CDR2
IYWDDDK

SEQ ID NO: 1888 - protein, 7 aa, Artificial sequence
  VH CDR2
IYYSGRT

SEQ ID NO: 1889 - protein, 10 aa, Artificial sequence
  VH CDR2
IKRIIDGGTI

SEQ ID NO: 1890 - protein, 8 aa, Artificial sequence
  VH CDR2
TNTNTGNP

SEQ ID NO: 1891 - protein, 8 aa, Artificial sequence
  VH CDR2
INPSGSAT

SEQ ID NO: 1892 - protein, 8 aa, Artificial sequence
  VH CDR2
ITWNSGNI

SEQ ID NO: 1893 - protein, 7 aa, Artificial sequence
  VH CDR2
ISQSAST

SEQ ID NO: 1894 - protein, 8 aa, Artificial sequence
  VH CDR2
IYPDDSET

SEQ ID NO: 1895 - protein, 8 aa, Artificial sequence
  VH CDR2
ISGSGDKT

SEQ ID NO: 1896 - protein, 9 aa, Artificial sequence
  VH CDR2
TYYRSNWYN

SEQ ID NO: 1897 - protein, 8 aa, Artificial sequence
  VH CDR2
ISWNSNSV

SEQ ID NO: 1898 - protein, 8 aa, Artificial sequence
  VH CDR2
INWNSDNI

SEQ ID NO: 1899 - protein, 7 aa, Artificial sequence
  VH CDR2
IYTVGDT

SEQ ID NO: 1900 - protein, 7 aa, Artificial sequence
  VH CDR2
IYYSGTT

SEQ ID NO: 1901 - protein, 7 aa, Artificial sequence
  VH CDR2
INRRGNT

SEQ ID NO: 1902 - protein, 7 aa, Artificial sequence
  VH CDR2
IYYSGNT

SEQ ID NO: 1903 - protein, 10 aa, Artificial sequence
  VH CDR2
IKSKTDGGTT

SEQ ID NO: 1904 - protein, 8 aa, Artificial sequence
  VH CDR2
IIPSLRTA

SEQ ID NO: 1905 - protein, 10 aa, Artificial sequence
  VH CDR2
IKSRGSGGTI

SEQ ID NO: 1906 - protein, 8 aa, Artificial sequence
  VH CDR2
ISYDGRNK

SEQ ID NO: 1907 - protein, 8 aa, Artificial sequence
  VH CDR2
VSYDSRQQ

SEQ ID NO: 1908 - protein, 8 aa, Artificial sequence
  VH CDR2
IWYDGSNE

SEQ ID NO: 1909 - protein, 8 aa, Artificial sequence
  VH CDR2
LSNDDRTR

SEQ ID NO: 1910 - protein, 7 aa, Artificial sequence
  VH CDR2
IYSSGDT

SEQ ID NO: 1911 - protein, 7 aa, Artificial sequence
  VH CDR2
INPSGGS

SEQ ID NO: 1912 - protein, 7 aa, Artificial sequence
  VH CDR2
INHSGRT

SEQ ID NO: 1913 - protein, 7 aa, Artificial sequence
  VH CDR2
IYYSGST

SEQ ID NO: 1914 - protein, 7 aa, Artificial sequence
  VH CDR2
IFSNDEK

SEQ ID NO: 1915 - protein, 8 aa, Artificial sequence
  VH CDR2
ISYDGSNK

SEQ ID NO: 1916 - protein, 10 aa, Artificial sequence
  VH CDR2
IRSKAYGGTT

SEQ ID NO: 1917 - protein, 10 aa, Artificial sequence
  VH CDR2
IRSKANSYAT

SEQ ID NO: 1918 - protein, 8 aa, Artificial sequence
  VH CDR2
IDPSDSYT

SEQ ID NO: 1919 - protein, 8 aa, Artificial sequence
  VH CDR2
INPSGGST

SEQ ID NO: 1920 - protein, 8 aa, Artificial sequence
  VH CDR2
IIPIFHIA

SEQ ID NO: 1921 - protein, 10 aa, Artificial sequence
  VH CDR2
IKSKTDGGTT

SEQ ID NO: 1922 - protein, 8 aa, Artificial sequence
  VH CDR2
IFSDWSTT

SEQ ID NO: 1923 - protein, 8 aa, Artificial sequence
  VH CDR2
ISGSGGST

SEQ ID NO: 1924 - protein, 8 aa, Artificial sequence
  VH CDR2
ISYDGSNK

SEQ ID NO: 1925 - protein, 7 aa, Artificial sequence
  VH CDR2
IYSGSST

SEQ ID NO: 1926 - protein, 7 aa, Artificial sequence
  VH CDR2
IYYSGST

SEQ ID NO: 1927 - protein, 7 aa, Artificial sequence
  VH CDR2
IYYSGST

SEQ ID NO: 1928 - protein, 7 aa, Artificial sequence
  VH CDR2
IYYSGST

SEQ ID NO: 1929 - protein, 8 aa, Artificial sequence
  VH CDR2
ISSSSSYI

SEQ ID NO: 1930 - protein, 8 aa, Artificial sequence
  VH CDR2
ISAYNGNT

SEQ ID NO: 1931 - protein, 8 aa, Artificial sequence
  VH CDR2
INSDGSST

SEQ ID NO: 1932 - protein, 7 aa, Artificial sequence
  VH CDR2
IYHSGST

SEQ ID NO: 1933 - protein, 8 aa, Artificial sequence
  VH CDR2
IFPSDSDT

SEQ ID NO: 1934 - protein, 8 aa, Artificial sequence
  VH CDR2
IFPGDSET

SEQ ID NO: 1935 - protein, 8 aa, Artificial sequence
  VH CDR2
IFPGDSDT

SEQ ID NO: 1936 - protein, 10 aa, Artificial sequence
  VH CDR2
IRTRTNRYAT

SEQ ID NO: 1937 - protein, 7 aa, Artificial sequence
  VH CDR2
IYYSGST

SEQ ID NO: 1938 - protein, 8 aa, Artificial sequence
  VH CDR2
INSDGSST

SEQ ID NO: 1939 - protein, 8 aa, Artificial sequence
  VH CDR2
ISAYNGNT

SEQ ID NO: 1940 - protein, 7 aa, Artificial sequence
  VH CDR2
IYWDDDK

SEQ ID NO: 1941 - protein, 8 aa, Artificial sequence
  VH CDR2
ISYDGSNK

SEQ ID NO: 1942 - protein, 8 aa, Artificial sequence
  VH CDR2
ISYDGSNK

SEQ ID NO: 1943 - protein, 8 aa, Artificial sequence
  VH CDR2
ISSSGSTI

SEQ ID NO: 1944 - protein, 8 aa, Artificial sequence
  VH CDR2
ISGSGGST

SEQ ID NO: 1945 - protein, 8 aa, Artificial sequence
  VH CDR2
ISFDGSNI

SEQ ID NO: 1946 - protein, 8 aa, Artificial sequence
  VH CDR2
ISYDGSNK

SEQ ID NO: 1947 - protein, 8 aa, Artificial sequence
  VH CDR2
IWNDGNKQ

SEQ ID NO: 1948 - protein, 8 aa, Artificial sequence
  VH CDR2
IWYDGSNK

SEQ ID NO: 1949 - protein, 7 aa, Artificial sequence
  VH CDR2
IFYSGST

SEQ ID NO: 1950 - protein, 7 aa, Artificial sequence
  VH CDR2
ISYSGDT

SEQ ID NO: 1951 - protein, 8 aa, Artificial sequence
  VH CDR2
ISFDGSNK

SEQ ID NO: 1952 - protein, 8 aa, Artificial sequence
  VH CDR2
ISYEGSIR

SEQ ID NO: 1953 - protein, 7 aa, Artificial sequence
  VH CDR2
IYSGGST

SEQ ID NO: 1954 - protein, 8 aa, Artificial sequence
  VH CDR2
ISYEGSTE

SEQ ID NO: 1955 - protein, 8 aa, Artificial sequence
  VH CDR2
ISYEGSTE

SEQ ID NO: 1956 - protein, 8 aa, Artificial sequence
  VH CDR2
IKEDGSEK

SEQ ID NO: 1957 - protein, 8 aa, Artificial sequence
  VH CDR2
IIPMLNKT

SEQ ID NO: 1958 - protein, 8 aa, Artificial sequence
  VH CDR2
IIPMLNKT

SEQ ID NO: 1959 - protein, 7 aa, Artificial sequence
  VH CDR2
IYWNDNK

SEQ ID NO: 1960 - protein, 7 aa, Artificial sequence
  VH CDR2
IYYRGST

SEQ ID NO: 1961 - protein, 8 aa, Artificial sequence
  VH CDR2
ISYEGSTE

SEQ ID NO: 1962 - protein, 8 aa, Artificial sequence
  VH CDR2
ISSSSSTV

SEQ ID NO: 1963 - protein, 8 aa, Artificial sequence
  VH CDR2
ISSSSSTT

SEQ ID NO: 1964 - protein, 8 aa, Artificial sequence
  VH CDR2
LNKDESEK

SEQ ID NO: 1965 - protein, 7 aa, Artificial sequence
  VH CDR2
IYSGRNT

SEQ ID NO: 1966 - protein, 7 aa, Artificial sequence
  VH CDR2
IYYSGST

SEQ ID NO: 1967 - protein, 7 aa, Artificial sequence
  VH CDR2
IYYSGST

SEQ ID NO: 1968 - protein, 8 aa, Artificial sequence
  VH CDR2
ISAYNGNT

SEQ ID NO: 1969 - protein, 8 aa, Artificial sequence
  VH CDR2
INPNSGGT

SEQ ID NO: 1970 - protein, 8 aa, Artificial sequence
  VH CDR2
FDPEDGET

SEQ ID NO: 1971 - protein, 8 aa, Artificial sequence
  VH CDR2
INTDNEKT

SEQ ID NO: 1972 - protein, 8 aa, Artificial sequence
  VH CDR2
INTDNGKT

SEQ ID NO: 1973 - protein, 8 aa, Artificial sequence
  VH CDR2
INAGNGNT

SEQ ID NO: 1974 - protein, 8 aa, Artificial sequence
  VH CDR2
INPSGGST

SEQ ID NO: 1975 - protein, 8 aa, Artificial sequence
  VH CDR2
INPSDGST

SEQ ID NO: 1976 - protein, 8 aa, Artificial sequence
  VH CDR2
IIPMLNKT

SEQ ID NO: 1977 - protein, 8 aa, Artificial sequence
  VH CDR2
IIPIFGPP

SEQ ID NO: 1978 - protein, 8 aa, Artificial sequence
  VH CDR2
MNPNTGTT

SEQ ID NO: 1979 - protein, 7 aa, Artificial sequence
  VH CDR2
IYWNDYK

SEQ ID NO: 1980 - protein, 8 aa, Artificial sequence
  VH CDR2
ISGSGGST

SEQ ID NO: 1981 - protein, 8 aa, Artificial sequence
  VH CDR2
ISGSGGTT

SEQ ID NO: 1982 - protein, 8 aa, Artificial sequence
  VH CDR2
ISYDGSNK

SEQ ID NO: 1983 - protein, 8 aa, Artificial sequence
  VH CDR2
ISYDGINK

SEQ ID NO: 1984 - protein, 8 aa, Artificial sequence
  VH CDR2
ISYDGSNK

SEQ ID NO: 1985 - protein, 8 aa, Artificial sequence
  VH CDR2
ISYDGSNK

SEQ ID NO: 1986 - protein, 8 aa, Artificial sequence
  VH CDR2
MWFDGVDK

SEQ ID NO: 1987 - protein, 8 aa, Artificial sequence
  VH CDR2
ISYDEINK

SEQ ID NO: 1988 - protein, 10 aa, Artificial sequence
  VH CDR2
IRGRLVGATV

SEQ ID NO: 1989 - protein, 10 aa, Artificial sequence
  VH CDR2
IRGRLVGATV

SEQ ID NO: 1990 - protein, 8 aa, Artificial sequence
  VH CDR2
IKQDGSEK

SEQ ID NO: 1991 - protein, 7 aa, Artificial sequence
  VH CDR2
IYYSGST

SEQ ID NO: 1992 - protein, 7 aa, Artificial sequence
  VH CDR2
IHRSGST

SEQ ID NO: 1993 - protein, 7 aa, Artificial sequence
  VH CDR2
IHRSGST

SEQ ID NO: 1994 - protein, 7 aa, Artificial sequence
  VH CDR2
ITHSGST

SEQ ID NO: 1995 - protein, 7 aa, Artificial sequence
  VH CDR2
INHSGST

SEQ ID NO: 1996 - protein, 7 aa, Artificial sequence
  VH CDR2
IYHSGTT

SEQ ID NO: 1997 - protein, 7 aa, Artificial sequence
  VH CDR2
IYTSGST

SEQ ID NO: 1998 - protein, 7 aa, Artificial sequence
  VH CDR2
IYHSGSA

SEQ ID NO: 1999 - protein, 7 aa, Artificial sequence
  VH CDR2
LHYSGRS

SEQ ID NO: 2000 - protein, 7 aa, Artificial sequence
  VH CDR2
IYTSGST

SEQ ID NO: 2001 - protein, 7 aa, Artificial sequence
  VH CDR2
IYAGEST

SEQ ID NO: 2002 - protein, 8 aa, Artificial sequence
  VH CDR2
IYPGDSDT

SEQ ID NO: 2003 - protein, 8 aa, Artificial sequence
  VH CDR2
IYPGDSDT

SEQ ID NO: 2004 - protein, 8 aa, Artificial sequence
  VH CDR2
INTNTGNP

SEQ ID NO: 2005 - protein, 8 aa, Artificial sequence
  VH CDR2
IYPGDFDT

SEQ ID NO: 2006 - protein, 7 aa, Artificial sequence
  VH CDR2
IYSGVIT

SEQ ID NO: 2007 - protein, 7 aa, Artificial sequence
  VH CDR2
VTHSGST

SEQ ID NO: 2008 - protein, 8 aa, Artificial sequence
  VH CDR2
FDPEDGET

SEQ ID NO: 2009 - protein, 8 aa, Artificial sequence
  VH CDR2
ISSSGSTI

SEQ ID NO: 2010 - protein, 7 aa, Artificial sequence
  VH CDR2
IYSGGST

SEQ ID NO: 2011 - protein, 8 aa, Artificial sequence
  VH CDR2
IKEDGSVM

SEQ ID NO: 2012 - protein, 8 aa, Artificial sequence
  VH CDR2
IKSDGSET

SEQ ID NO: 2013 - protein, 8 aa, Artificial sequence
  VH CDR2
IWFDGSKK

SEQ ID NO: 2014 - protein, 8 aa, Artificial sequence
  VH CDR2
ISSSGGGT

SEQ ID NO: 2015 - protein, 8 aa, Artificial sequence
  VH CDR2
ITWNSGSI

SEQ ID NO: 2016 - protein, 7 aa, Artificial sequence
  VH CDR2
IYSGGST

SEQ ID NO: 2017 - protein, 7 aa, Artificial sequence
  VH CDR2
IYYGGST

SEQ ID NO: 2018 - protein, 7 aa, Artificial sequence
  VH CDR2
IYYSGST

SEQ ID NO: 2019 - protein, 7 aa, Artificial sequence
  VH CDR2
IGTAGDT

SEQ ID NO: 2020 - protein, 8 aa, Artificial sequence
  VH CDR2
MSYDGSDI

SEQ ID NO: 2021 - protein, 8 aa, Artificial sequence
  VH CDR2
ISYDGNNK

SEQ ID NO: 2022 - protein, 8 aa, Artificial sequence
  VH CDR2
VSWNSGTI

SEQ ID NO: 2023 - protein, 8 aa, Artificial sequence
  VH CDR2
INPADSDT

SEQ ID NO: 2024 - protein, 8 aa, Artificial sequence
  VH CDR2
INPSGDST

SEQ ID NO: 2025 - protein, 8 aa, Artificial sequence
  VH CDR2
IIPIFGTA

SEQ ID NO: 2026 - protein, 8 aa, Artificial sequence
  VH CDR2
IFPIFTAA

SEQ ID NO: 2027 - protein, 8 aa, Artificial sequence
  VH CDR2
VSGSGGST

SEQ ID NO: 2028 - protein, 8 aa, Artificial sequence
  VH CDR2
ISSDGNNR

SEQ ID NO: 2029 - protein, 8 aa, Artificial sequence
  VH CDR2
ISWNSGSI

SEQ ID NO: 2030 - protein, 8 aa, Artificial sequence
  VH CDR2
ISWNSGTI

SEQ ID NO: 2031 - protein, 8 aa, Artificial sequence
  VH CDR2
ISWNSEKI

SEQ ID NO: 2032 - protein, 8 aa, Artificial sequence
  VH CDR2
INSGSSII

SEQ ID NO: 2033 - protein, 8 aa, Artificial sequence
  VH CDR2
ISSSDNSV

SEQ ID NO: 2034 - protein, 7 aa, Artificial sequence
  VH CDR2
IYSGGST

SEQ ID NO: 2035 - protein, 7 aa, Artificial sequence
  VH CDR2
INHSGKT

SEQ ID NO: 2036 - protein, 7 aa, Artificial sequence
  VH CDR2
INHSGST

SEQ ID NO: 2037 - protein, 7 aa, Artificial sequence
  VH CDR2
MYNSGST

SEQ ID NO: 2038 - protein, 7 aa, Artificial sequence
  VH CDR2
IYYSGRT

SEQ ID NO: 2039 - protein, 7 aa, Artificial sequence
  VH CDR2
IFYTGTS

SEQ ID NO: 2040 - protein, 7 aa, Artificial sequence
  VH CDR2
IYWDDEK

SEQ ID NO: 2041 - protein, 8 aa, Artificial sequence
  VH CDR2
IWYDGDNR

SEQ ID NO: 2042 - protein, 8 aa, Artificial sequence
  VH CDR2
IYYDGSNE

SEQ ID NO: 2043 - protein, 8 aa, Artificial sequence
  VH CDR2
IDSSSTTI

SEQ ID NO: 2044 - protein, 8 aa, Artificial sequence
  VH CDR2
INTKTGIP

SEQ ID NO: 2045 - protein, 8 aa, Artificial sequence
  VH CDR2
ISAYNGNT

SEQ ID NO: 2046 - protein, 8 aa, Artificial sequence
  VH CDR2
ISHDDSQK

SEQ ID NO: 2047 - protein, 8 aa, Artificial sequence
  VH CDR2
ISYEGSKK

SEQ ID NO: 2048 - protein, 8 aa, Artificial sequence
  VH CDR2
ISYEGSKK

SEQ ID NO: 2049 - protein, 8 aa, Artificial sequence
  VH CDR2
ISSSGSTI

SEQ ID NO: 2050 - protein, 8 aa, Artificial sequence
  VH CDR2
INTNTGSP

SEQ ID NO: 2051 - protein, 8 aa, Artificial sequence
  VH CDR2
ISAYNGET

SEQ ID NO: 2052 - protein, 8 aa, Artificial sequence
  VH CDR2
FDPEDGET

SEQ ID NO: 2053 - protein, 8 aa, Artificial sequence
  VH CDR2
ISPSGDDA

SEQ ID NO: 2054 - protein, 10 aa, Artificial sequence
  VH CDR2
IRSKSDGGTT

SEQ ID NO: 2055 - protein, 10 aa, Artificial sequence
  VH CDR2
VKSKTDGGTT

SEQ ID NO: 2056 - protein, 8 aa, Artificial sequence
  VH CDR2
ISYDGSNK

SEQ ID NO: 2057 - protein, 8 aa, Artificial sequence
  VH CDR2
ISWDGGST

SEQ ID NO: 2058 - protein, 8 aa, Artificial sequence
  VH CDR2
ISPSGDDA

SEQ ID NO: 2059 - protein, 8 aa, Artificial sequence
  VH CDR2
IVPMLGIT

SEQ ID NO: 2060 - protein, 7 aa, Artificial sequence
  VH CDR2
IYWDDDK

SEQ ID NO: 2061 - protein, 7 aa, Artificial sequence
  VH CDR2
IYWDDEK

SEQ ID NO: 2062 - protein, 8 aa, Artificial sequence
  VH CDR2
ISSGGDAI

SEQ ID NO: 2063 - protein, 8 aa, Artificial sequence
  VH CDR2
MSSDSDYI

SEQ ID NO: 2064 - protein, 8 aa, Artificial sequence
  VH CDR2
ISHDESQK

SEQ ID NO: 2065 - protein, 8 aa, Artificial sequence
  VH CDR2
ISHDESQK

SEQ ID NO: 2066 - protein, 8 aa, Artificial sequence
  VH CDR2
ISYEGSKK

SEQ ID NO: 2067 - protein, 8 aa, Artificial sequence
  VH CDR2
ISYDGSNK

SEQ ID NO: 2068 - protein, 8 aa, Artificial sequence
  VH CDR2
ITSSGNTI

SEQ ID NO: 2069 - protein, 8 aa, Artificial sequence
  VH CDR2
ISSSSGTI

SEQ ID NO: 2070 - protein, 7 aa, Artificial sequence
  VH CDR2
IYYTGKT

SEQ ID NO: 2071 - protein, 7 aa, Artificial sequence
  VH CDR2
VYNSGTA

SEQ ID NO: 2072 - protein, 8 aa, Artificial sequence
  VH CDR2
IDTNTGKP

SEQ ID NO: 2073 - protein, 8 aa, Artificial sequence
  VH CDR2
IIPIFGTA

SEQ ID NO: 2074 - protein, 8 aa, Artificial sequence
  VH CDR2
IIPIFGTA

SEQ ID NO: 2075 - protein, 10 aa, Artificial sequence
  VH CDR2
IKSNTDGGTT

SEQ ID NO: 2076 - protein, 8 aa, Artificial sequence
  VH CDR2
ISSSGSTI

SEQ ID NO: 2077 - protein, 7 aa, Artificial sequence
  VH CDR2
IYSGGST

SEQ ID NO: 2078 - protein, 7 aa, Artificial sequence
  VH CDR2
IYYSGST

SEQ ID NO: 2079 - protein, 8 aa, Artificial sequence
  VH CDR2
ISAYNGNT

SEQ ID NO: 2080 - protein, 8 aa, Artificial sequence
  VH CDR2
ISTYSGNT

SEQ ID NO: 2081 - protein, 8 aa, Artificial sequence
  VH CDR2
FDPEDGET

SEQ ID NO: 2082 - protein, 8 aa, Artificial sequence
  VH CDR2
FDPEDGET

SEQ ID NO: 2083 - protein, 8 aa, Artificial sequence
  VH CDR2
FDPEDGET

SEQ ID NO: 2084 - protein, 8 aa, Artificial sequence
  VH CDR2
FDPEDGET

SEQ ID NO: 2085 - protein, 8 aa, Artificial sequence
  VH CDR2
INAGNGNT

SEQ ID NO: 2086 - protein, 8 aa, Artificial sequence
  VH CDR2
IIPIFGTA

SEQ ID NO: 2087 - protein, 7 aa, Artificial sequence
  VH CDR2
IFSNDKK

SEQ ID NO: 2088 - protein, 7 aa, Artificial sequence
  VH CDR2
IYWDDDK

SEQ ID NO: 2089 - protein, 7 aa, Artificial sequence
  VH CDR2
IFWDDDK

SEQ ID NO: 2090 - protein, 8 aa, Artificial sequence
  VH CDR2
ISSSSSYI

SEQ ID NO: 2091 - protein, 8 aa, Artificial sequence
  VH CDR2
ISSSSSYI

SEQ ID NO: 2092 - protein, 8 aa, Artificial sequence
  VH CDR2
ISYDGSNK

SEQ ID NO: 2093 - protein, 8 aa, Artificial sequence
  VH CDR2
ISYDGSNK

SEQ ID NO: 2094 - protein, 8 aa, Artificial sequence
  VH CDR2
ISYDGSNK

SEQ ID NO: 2095 - protein, 8 aa, Artificial sequence
  VH CDR2
IWNDGSNK

SEQ ID NO: 2096 - protein, 8 aa, Artificial sequence
  VH CDR2
ISYDGSNK

SEQ ID NO: 2097 - protein, 8 aa, Artificial sequence
  VH CDR2
ISYDGSNK

SEQ ID NO: 2098 - protein, 7 aa, Artificial sequence
  VH CDR2
IYSGGST

SEQ ID NO: 2099 - protein, 8 aa, Artificial sequence
  VH CDR2
IKEDGSET

SEQ ID NO: 2100 - protein, 7 aa, Artificial sequence
  VH CDR2
IDHSGST

SEQ ID NO: 2101 - protein, 7 aa, Artificial sequence
  VH CDR2
INHSGST

SEQ ID NO: 2102 - protein, 7 aa, Artificial sequence
  VH CDR2
INHSGST

SEQ ID NO: 2103 - protein, 7 aa, Artificial sequence
  VH CDR2
IYYSGST

SEQ ID NO: 2104 - protein, 7 aa, Artificial sequence
  VH CDR2
IYYSGST

SEQ ID NO: 2105 - protein, 8 aa, Artificial sequence
  VH CDR2
IDPSDSYT

SEQ ID NO: 2106 - protein, 8 aa, Artificial sequence
  VH CDR2
INTNTGNP

SEQ ID NO: 2107 - protein, 7 aa, Artificial sequence
  VH CDR2
VYSGGHA

SEQ ID NO: 2108 - protein, 7 aa, Artificial sequence
  VH CDR2
IFSSGST

SEQ ID NO: 2109 - protein, 8 aa, Artificial sequence
  VH CDR2
IIPILGIA

SEQ ID NO: 2110 - protein, 8 aa, Artificial sequence
  VH CDR2
ISTYSGNT

SEQ ID NO: 2111 - protein, 8 aa, Artificial sequence
  VH CDR2
ISTYSGNT

SEQ ID NO: 2112 - protein, 7 aa, Artificial sequence
  VH CDR2
IYWDDDQ

SEQ ID NO: 2113 - protein, 8 aa, Artificial sequence
  VH CDR2
INTNTGTP

SEQ ID NO: 2114 - protein, 8 aa, Artificial sequence
  VH CDR2
IVVGSGNT

SEQ ID NO: 2115 - protein, 7 aa, Artificial sequence
  VH CDR2
IDWDDDK

SEQ ID NO: 2116 - protein, 8 aa, Artificial sequence
  VH CDR2
ISDSGGSA

SEQ ID NO: 2117 - protein, 8 aa, Artificial sequence
  VH CDR2
ISDGGGSA

SEQ ID NO: 2118 - protein, 8 aa, Artificial sequence
  VH CDR2
ISAYNGNT

SEQ ID NO: 2119 - protein, 8 aa, Artificial sequence
  VH CDR2
ISGYNGNT

SEQ ID NO: 2120 - protein, 8 aa, Artificial sequence
  VH CDR2
INPNSGGT

SEQ ID NO: 2121 - protein, 10 aa, Artificial sequence
  VH CDR2
IKSKNDGGTT

SEQ ID NO: 2122 - protein, 8 aa, Artificial sequence
  VH CDR2
ISYDGNKR

SEQ ID NO: 2123 - protein, 8 aa, Artificial sequence
  VH CDR2
ISWNSGSI

SEQ ID NO: 2124 - protein, 8 aa, Artificial sequence
  VH CDR2
ITWNYATV

SEQ ID NO: 2125 - protein, 8 aa, Artificial sequence
  VH CDR2
ISAYNGNT

SEQ ID NO: 2126 - protein, 8 aa, Artificial sequence
  VH CDR2
ISAYNGNT

SEQ ID NO: 2127 - protein, 8 aa, Artificial sequence
  VH CDR2
INPNSGET

SEQ ID NO: 2128 - protein, 8 aa, Artificial sequence
  VH CDR2
IIPIFGTA

SEQ ID NO: 2129 - protein, 8 aa, Artificial sequence
  VH CDR2
IIPILGIA

SEQ ID NO: 2130 - protein, 10 aa, Artificial sequence
  VH CDR2
IKSKTDGGTT

SEQ ID NO: 2131 - protein, 10 aa, Artificial sequence
  VH CDR2
IKSRSDGGKI

SEQ ID NO: 2132 - protein, 8 aa, Artificial sequence
  VH CDR2
ISGSGGST

SEQ ID NO: 2133 - protein, 8 aa, Artificial sequence
  VH CDR2
ISANGRSP

SEQ ID NO: 2134 - protein, 8 aa, Artificial sequence
  VH CDR2
ISGSGGST

SEQ ID NO: 2135 - protein, 8 aa, Artificial sequence
  VH CDR2
ISYDGSNK

SEQ ID NO: 2136 - protein, 8 aa, Artificial sequence
  VH CDR2
ISYDGSNK

SEQ ID NO: 2137 - protein, 8 aa, Artificial sequence
  VH CDR2
ISYDGANK

SEQ ID NO: 2138 - protein, 8 aa, Artificial sequence
  VH CDR2
MWHDGSNK

SEQ ID NO: 2139 - protein, 8 aa, Artificial sequence
  VH CDR2
IWYDGSNK

SEQ ID NO: 2140 - protein, 8 aa, Artificial sequence
  VH CDR2
ISYDGSNK

SEQ ID NO: 2141 - protein, 8 aa, Artificial sequence
  VH CDR2
ISWNSGSI

SEQ ID NO: 2142 - protein, 7 aa, Artificial sequence
  VH CDR2
IYSGGST

SEQ ID NO: 2143 - protein, 7 aa, Artificial sequence
  VH CDR2
IYSGGTT

SEQ ID NO: 2144 - protein, 7 aa, Artificial sequence
  VH CDR2
IYSGGST

SEQ ID NO: 2145 - protein, 7 aa, Artificial sequence
  VH CDR2
IYSGGST

SEQ ID NO: 2146 - protein, 7 aa, Artificial sequence
  VH CDR2
LYSGGTT

SEQ ID NO: 2147 - protein, 7 aa, Artificial sequence
  VH CDR2
IYSGGST

SEQ ID NO: 2148 - protein, 7 aa, Artificial sequence
  VH CDR2
IYSGGST

SEQ ID NO: 2149 - protein, 8 aa, Artificial sequence
  VH CDR2
IKSDGSST

SEQ ID NO: 2150 - protein, 7 aa, Artificial sequence
  VH CDR2
IYYSGST

SEQ ID NO: 2151 - protein, 7 aa, Artificial sequence
  VH CDR2
IYYSGST

SEQ ID NO: 2152 - protein, 7 aa, Artificial sequence
  VH CDR2
ISHGGKT

SEQ ID NO: 2153 - protein, 7 aa, Artificial sequence
  VH CDR2
INHSGTT

SEQ ID NO: 2154 - protein, 7 aa, Artificial sequence
  VH CDR2
IYYSGST

SEQ ID NO: 2155 - protein, 8 aa, Artificial sequence
  VH CDR2
IYPGDSDT

SEQ ID NO: 2156 - protein, 8 aa, Artificial sequence
  VH CDR2
IIPIVGFA

SEQ ID NO: 2157 - protein, 7 aa, Artificial sequence
  VH CDR2
ISYDGSN

SEQ ID NO: 2158 - protein, 8 aa, Artificial sequence
  VH CDR2
ISYDGSNK

SEQ ID NO: 2159 - protein, 11 aa, Artificial sequence
  VH CDR2
ISGISDSGGNT

SEQ ID NO: 2160 - protein, 7 aa, Artificial sequence
  VH CDR2
IYSGGST

SEQ ID NO: 2161 - protein, 7 aa, Artificial sequence
  VH CDR2
IYTTGST

SEQ ID NO: 2162 - protein, 8 aa, Artificial sequence
  VH CDR2
ISAYNGNT

SEQ ID NO: 2163 - protein, 8 aa, Artificial sequence
  VH CDR2
INPSGGST

SEQ ID NO: 2164 - protein, 8 aa, Artificial sequence
  VH CDR2
IIPILGIA

SEQ ID NO: 2165 - protein, 7 aa, Artificial sequence
  VH CDR2
IYWDDDK

SEQ ID NO: 2166 - protein, 8 aa, Artificial sequence
  VH CDR2
ISARGSVT

SEQ ID NO: 2167 - protein, 8 aa, Artificial sequence
  VH CDR2
ISYDGSNK

SEQ ID NO: 2168 - protein, 8 aa, Artificial sequence
  VH CDR2
ISNYGSNK

SEQ ID NO: 2169 - protein, 7 aa, Artificial sequence
  VH CDR2
IYSGGST

SEQ ID NO: 2170 - protein, 7 aa, Artificial sequence
  VH CDR2
IYSGGST

SEQ ID NO: 2171 - protein, 7 aa, Artificial sequence
  VH CDR2
IYSGGTT

SEQ ID NO: 2172 - protein, 7 aa, Artificial sequence
  VH CDR2
IYSGGST

SEQ ID NO: 2173 - protein, 7 aa, Artificial sequence
  VH CDR2
IYSGGST

SEQ ID NO: 2174 - protein, 7 aa, Artificial sequence
  VH CDR2
LYAGGST

SEQ ID NO: 2175 - protein, 7 aa, Artificial sequence
  VH CDR2
IYSGGST

SEQ ID NO: 2176 - protein, 7 aa, Artificial sequence
  VH CDR2
IYSGGST

SEQ ID NO: 2177 - protein, 7 aa, Artificial sequence
  VH CDR2
IYSGGST

SEQ ID NO: 2178 - protein, 7 aa, Artificial sequence
  VH CDR2
IYSGGST

SEQ ID NO: 2179 - protein, 7 aa, Artificial sequence
  VH CDR2
IYSGGST

SEQ ID NO: 2180 - protein, 7 aa, Artificial sequence
  VH CDR2
IYSGGST

SEQ ID NO: 2181 - protein, 6 aa, Artificial sequence
  VL CDR1
QSIASY

SEQ ID NO: 2182 - protein, 6 aa, Artificial sequence
  VL CDR1
QGISSY

SEQ ID NO: 2183 - protein, 9 aa, Artificial sequence
  VL CDR1
SSDVGGYNY

SEQ ID NO: 2184 - protein, 6 aa, Artificial sequence
  VL CDR1
QSISDW

SEQ ID NO: 2185 - protein, 6 aa, Artificial sequence
  VL CDR1
QSISSY

SEQ ID NO: 2186 - protein, 6 aa, Artificial sequence
  VL CDR1
QDISNY

SEQ ID NO: 2187 - protein, 7 aa, Artificial sequence
  VL CDR1
QSVSSSY

SEQ ID NO: 2188 - protein, 8 aa, Artificial sequence
  VL CDR1
NSNIGINN

SEQ ID NO: 2189 - protein, 7 aa, Artificial sequence
  VL CDR1
SGHSSYA

SEQ ID NO: 2190 - protein, 6 aa, Artificial sequence
  VL CDR1
ALPKQY

SEQ ID NO: 2191 - protein, 6 aa, Artificial sequence
  VL CDR1
QSISSY

SEQ ID NO: 2192 - protein, 6 aa, Artificial sequence
  VL CDR1
QGISSA

SEQ ID NO: 2193 - protein, 9 aa, Artificial sequence
  VL CDR1
SSDFGTFHL

SEQ ID NO: 2194 - protein, 8 aa, Artificial sequence
  VL CDR1
AFNIGTNF

SEQ ID NO: 2195 - protein, 11 aa, Artificial sequence
  VL CDR1
QSLVYYDGNTY

SEQ ID NO: 2196 - protein, 6 aa, Artificial sequence
  VL CDR1
QSISRW

SEQ ID NO: 2197 - protein, 6 aa, Artificial sequence
  VL CDR1
QHISNY

SEQ ID NO: 2198 - protein, 6 aa, Artificial sequence
  VL CDR1
ALPKQY

SEQ ID NO: 2199 - protein, 13 aa, Artificial sequence
  VL CDR1
QSVLYSSNNNKNY

SEQ ID NO: 2200 - protein, 8 aa, Artificial sequence
  VL CDR1
GASIASNY

SEQ ID NO: 2201 - protein, 12 aa, Artificial sequence
  VL CDR1
QSVLYSSNNKNY

SEQ ID NO: 2202 - protein, 12 aa, Artificial sequence
  VL CDR1
HSVFFSKVNKDY

SEQ ID NO: 2203 - protein, 6 aa, Artificial sequence
  VL CDR1
QSISSW

SEQ ID NO: 2204 - protein, 9 aa, Artificial sequence
  VL CDR1
SSDVGGYNY

SEQ ID NO: 2205 - protein, 6 aa, Artificial sequence
  VL CDR1
ALPKQY

SEQ ID NO: 2206 - protein, 9 aa, Artificial sequence
  VL CDR1
SSDVGGYNY

SEQ ID NO: 2207 - protein, 7 aa, Artificial sequence
  VL CDR1
QSVSSSY

SEQ ID NO: 2208 - protein, 7 aa, Artificial sequence
  VL CDR1
QSVSSSY

SEQ ID NO: 2209 - protein, 6 aa, Artificial sequence
  VL CDR1
EDIDNH

SEQ ID NO: 2210 - protein, 7 aa, Artificial sequence
  VL CDR1
QSVSSSY

SEQ ID NO: 2211 - protein, 8 aa, Artificial sequence
  VL CDR1
RSNIGSKN

SEQ ID NO: 2212 - protein, 9 aa, Artificial sequence
  VL CDR1
SSDVGSYHY

SEQ ID NO: 2213 - protein, 12 aa, Artificial sequence
  VL CDR1
QSVLYSANNKYY

SEQ ID NO: 2214 - protein, 6 aa, Artificial sequence
  VL CDR1
QSVKSY

SEQ ID NO: 2215 - protein, 6 aa, Artificial sequence
  VL CDR1
KDINSY

SEQ ID NO: 2216 - protein, 12 aa, Artificial sequence
  VL CDR1
QSVLYSSNNKNY

SEQ ID NO: 2217 - protein, 6 aa, Artificial sequence
  VL CDR1
QDISSS

SEQ ID NO: 2218 - protein, 6 aa, Artificial sequence
  VL CDR1
ALSNQY

SEQ ID NO: 2219 - protein, 6 aa, Artificial sequence
  VL CDR1
QDISNF

SEQ ID NO: 2220 - protein, 6 aa, Artificial sequence
  VL CDR1
QAISNS

SEQ ID NO: 2221 - protein, 6 aa, Artificial sequence
  VL CDR1
RDIHNL

SEQ ID NO: 2222 - protein, 8 aa, Artificial sequence
  VL CDR1
NSNIGSNY

SEQ ID NO: 2223 - protein, 7 aa, Artificial sequence
  VL CDR1
QGISTNY

SEQ ID NO: 2224 - protein, 5 aa, Artificial sequence
  VL CDR1
GARYN

SEQ ID NO: 2225 - protein, 6 aa, Artificial sequence
  VL CDR1
QSISNH

SEQ ID NO: 2226 - protein, 7 aa, Artificial sequence
  VL CDR1
QSISTNY

SEQ ID NO: 2227 - protein, 7 aa, Artificial sequence
  VL CDR1
QSISTNY

SEQ ID NO: 2228 - protein, 7 aa, Artificial sequence
  VL CDR1
QSISTNY

SEQ ID NO: 2229 - protein, 6 aa, Artificial sequence
  VL CDR1
ALPKKY

SEQ ID NO: 2230 - protein, 9 aa, Artificial sequence
  VL CDR1
TGAVTSGHY

SEQ ID NO: 2231 - protein, 9 aa, Artificial sequence
  VL CDR1
SSNIGAGYD

SEQ ID NO: 2232 - protein, 6 aa, Artificial sequence
  VL CDR1
KLGDKY

SEQ ID NO: 2233 - protein, 8 aa, Artificial sequence
  VL CDR1
SSNIGNNY

SEQ ID NO: 2234 - protein, 6 aa, Artificial sequence
  VL CDR1
QSVSSN

SEQ ID NO: 2235 - protein, 9 aa, Artificial sequence
  VL CDR1
TGAVTSGHY

SEQ ID NO: 2236 - protein, 6 aa, Artificial sequence
  VL CDR1
QSISSY

SEQ ID NO: 2237 - protein, 9 aa, Artificial sequence
  VL CDR1
SSDVGGYNY

SEQ ID NO: 2238 - protein, 12 aa, Artificial sequence
  VL CDR1
QSVLYSSNNKNY

SEQ ID NO: 2239 - protein, 7 aa, Artificial sequence
  VL CDR1
QSVSSSY

SEQ ID NO: 2240 - protein, 8 aa, Artificial sequence
  VL CDR1
SSNIGNNY

SEQ ID NO: 2241 - protein, 9 aa, Artificial sequence
  VL CDR1
SSDVGGYNY

SEQ ID NO: 2242 - protein, 11 aa, Artificial sequence
  VL CDR1
QSLLHSNGYNY

SEQ ID NO: 2243 - protein, 11 aa, Artificial sequence
  VL CDR1
QSLLHSNGYNY

SEQ ID NO: 2244 - protein, 11 aa, Artificial sequence
  VL CDR1
QSLLHSNGYNY

SEQ ID NO: 2245 - protein, 6 aa, Artificial sequence
  VL CDR1
QSIASY

SEQ ID NO: 2246 - protein, 6 aa, Artificial sequence
  VL CDR1
QGISSY

SEQ ID NO: 2247 - protein, 6 aa, Artificial sequence
  VL CDR1
NIGSKS

SEQ ID NO: 2248 - protein, 6 aa, Artificial sequence
  VL CDR1
KLGDEY

SEQ ID NO: 2249 - protein, 8 aa, Artificial sequence
  VL CDR1
SSNIGNNY

SEQ ID NO: 2250 - protein, 9 aa, Artificial sequence
  VL CDR1
SSDVGGYNY

SEQ ID NO: 2251 - protein, 6 aa, Artificial sequence
  VL CDR1
LSINTD

SEQ ID NO: 2252 - protein, 6 aa, Artificial sequence
  VL CDR1
QGMSNY

SEQ ID NO: 2253 - protein, 6 aa, Artificial sequence
  VL CDR1
QSINSW

SEQ ID NO: 2254 - protein, 6 aa, Artificial sequence
  VL CDR1
QSISSW

SEQ ID NO: 2255 - protein, 7 aa, Artificial sequence
  VL CDR1
QTVSSTY

SEQ ID NO: 2256 - protein, 8 aa, Artificial sequence
  VL CDR1
SSNVGNQG

SEQ ID NO: 2257 - protein, 12 aa, Artificial sequence
  VL CDR1
QSVLYNSNNKDY

SEQ ID NO: 2258 - protein, 8 aa, Artificial sequence
  VL CDR1
SGSIASYF

SEQ ID NO: 2259 - protein, 9 aa, Artificial sequence
  VL CDR1
SGSVSTTYY

SEQ ID NO: 2260 - protein, 6 aa, Artificial sequence
  VL CDR1
QSVSDN

SEQ ID NO: 2261 - protein, 11 aa, Artificial sequence
  VL CDR1
QSLVHSDGNTY

SEQ ID NO: 2262 - protein, 8 aa, Artificial sequence
  VL CDR1
SSNIGNNY

SEQ ID NO: 2263 - protein, 8 aa, Artificial sequence
  VL CDR1
SSNIGSNY

SEQ ID NO: 2264 - protein, 11 aa, Artificial sequence
  VL CDR1
QSLVHSDGNTY

SEQ ID NO: 2265 - protein, 11 aa, Artificial sequence
  VL CDR1
QSLVYSDGNTY

SEQ ID NO: 2266 - protein, 7 aa, Artificial sequence
  VL CDR1
QSVRSNY

SEQ ID NO: 2267 - protein, 11 aa, Artificial sequence
  VL CDR1
QSLRQSQRFSY

SEQ ID NO: 2268 - protein, 11 aa, Artificial sequence
  VL CDR1
QSLLHSIGKTH

SEQ ID NO: 2269 - protein, 6 aa, Artificial sequence
  VL CDR1
HDIRTW

SEQ ID NO: 2270 - protein, 6 aa, Artificial sequence
  VL CDR1
QDIGNW

SEQ ID NO: 2271 - protein, 6 aa, Artificial sequence
  VL CDR1
SLETYY

SEQ ID NO: 2272 - protein, 6 aa, Artificial sequence
  VL CDR1
SLRTSY

SEQ ID NO: 2273 - protein, 9 aa, Artificial sequence
  VL CDR1
SSDVGGYNY

SEQ ID NO: 2274 - protein, 9 aa, Artificial sequence
  VL CDR1
SSNIGAGYD

SEQ ID NO: 2275 - protein, 12 aa, Artificial sequence
  VL CDR1
QSVLYSSNNKNY

SEQ ID NO: 2276 - protein, 11 aa, Artificial sequence
  VL CDR1
QSLVHSDGNTY

SEQ ID NO: 2277 - protein, 9 aa, Artificial sequence
  VL CDR1
SSDVGGYNY

SEQ ID NO: 2278 - protein, 6 aa, Artificial sequence
  VL CDR1
QSISSY

SEQ ID NO: 2279 - protein, 9 aa, Artificial sequence
  VL CDR1
SSDVGGYNY

SEQ ID NO: 2280 - protein, 6 aa, Artificial sequence
  VL CDR1
QSISSY

SEQ ID NO: 2281 - protein, 6 aa, Artificial sequence
  VL CDR1
SLRSYY

SEQ ID NO: 2282 - protein, 6 aa, Artificial sequence
  VL CDR1
ELGDTD

SEQ ID NO: 2283 - protein, 6 aa, Artificial sequence
  VL CDR1
QSISSW

SEQ ID NO: 2284 - protein, 11 aa, Artificial sequence
  VL CDR1
QSLVHSDGNTY

SEQ ID NO: 2285 - protein, 6 aa, Artificial sequence
  VL CDR1
QSISSY

SEQ ID NO: 2286 - protein, 9 aa, Artificial sequence
  VL CDR1
SSNIGAGYD

SEQ ID NO: 2287 - protein, 8 aa, Artificial sequence
  VL CDR1
SSNIGSNY

SEQ ID NO: 2288 - protein, 6 aa, Artificial sequence
  VL CDR1
SLRSYY

SEQ ID NO: 2289 - protein, 6 aa, Artificial sequence
  VL CDR1
QDISNY

SEQ ID NO: 2290 - protein, 8 aa, Artificial sequence
  VL CDR1
SSNIGNNY

SEQ ID NO: 2291 - protein, 6 aa, Artificial sequence
  VL CDR1
QSVSSN

SEQ ID NO: 2292 - protein, 6 aa, Artificial sequence
  VL CDR1
KLGDKY

SEQ ID NO: 2293 - protein, 7 aa, Artificial sequence
  VL CDR1
QSISTNY

SEQ ID NO: 2294 - protein, 7 aa, Artificial sequence
  VL CDR1
HSISTNY

SEQ ID NO: 2295 - protein, 7 aa, Artificial sequence
  VL CDR1
QTISTNY

SEQ ID NO: 2296 - protein, 7 aa, Artificial sequence
  VL CDR1
QTINSGY

SEQ ID NO: 2297 - protein, 7 aa, Artificial sequence
  VL CDR1
QSVSSSY

SEQ ID NO: 2298 - protein, 6 aa, Artificial sequence
  VL CDR1
ALPKQY

SEQ ID NO: 2299 - protein, 6 aa, Artificial sequence
  VL CDR1
QSISSY

SEQ ID NO: 2300 - protein, 6 aa, Artificial sequence
  VL CDR1
KLGDTY

SEQ ID NO: 2301 - protein, 11 aa, Artificial sequence
  VL CDR1
QSLLHSDGKTY

SEQ ID NO: 2302 - protein, 11 aa, Artificial sequence
  VL CDR1
QSLLHSDGKTY

SEQ ID NO: 2303 - protein, 11 aa, Artificial sequence
  VL CDR1
QSLLHSNGYNY

SEQ ID NO: 2304 - protein, 6 aa, Artificial sequence
  VL CDR1
ALPKKY

SEQ ID NO: 2305 - protein, 9 aa, Artificial sequence
  VL CDR1
SSDVGGYNY

SEQ ID NO: 2306 - protein, 6 aa, Artificial sequence
  VL CDR1
ALPKKY

SEQ ID NO: 2307 - protein, 6 aa, Artificial sequence
  VL CDR1
ESISNW

SEQ ID NO: 2308 - protein, 6 aa, Artificial sequence
  VL CDR1
QSVSSY

SEQ ID NO: 2309 - protein, 6 aa, Artificial sequence
  VL CDR1
QGIRND

SEQ ID NO: 2310 - protein, 6 aa, Artificial sequence
  VL CDR1
QGIGND

SEQ ID NO: 2311 - protein, 7 aa, Artificial sequence
  VL CDR1
QSVSGSY

SEQ ID NO: 2312 - protein, 7 aa, Artificial sequence
  VL CDR1
QSVSSSY

SEQ ID NO: 2313 - protein, 12 aa, Artificial sequence
  VL CDR1
QSLLYNFNNENY

SEQ ID NO: 2314 - protein, 11 aa, Artificial sequence
  VL CDR1
QSLLDSDGKTY

SEQ ID NO: 2315 - protein, 11 aa, Artificial sequence
  VL CDR1
QSLLDSDGKTY

SEQ ID NO: 2316 - protein, 11 aa, Artificial sequence
  VL CDR1
QSLLHSNGYNY

SEQ ID NO: 2317 - protein, 6 aa, Artificial sequence
  VL CDR1
QSVSTY

SEQ ID NO: 2318 - protein, 6 aa, Artificial sequence
  VL CDR1
QSVSSY

SEQ ID NO: 2319 - protein, 6 aa, Artificial sequence
  VL CDR1
QDSSKY

SEQ ID NO: 2320 - protein, 12 aa, Artificial sequence
  VL CDR1
QSVSFTSNNKNY

SEQ ID NO: 2321 - protein, 11 aa, Artificial sequence
  VL CDR1
QSLLDSDGKTY

SEQ ID NO: 2322 - protein, 6 aa, Artificial sequence
  VL CDR1
QDISTY

SEQ ID NO: 2323 - protein, 6 aa, Artificial sequence
  VL CDR1
QSISNY

SEQ ID NO: 2324 - protein, 11 aa, Artificial sequence
  VL CDR1
QSVVHSDGKTY

SEQ ID NO: 2325 - protein, 7 aa, Artificial sequence
  VL CDR1
HTISSSY

SEQ ID NO: 2326 - protein, 6 aa, Artificial sequence
  VL CDR1
ALPKQY

SEQ ID NO: 2327 - protein, 9 aa, Artificial sequence
  VL CDR1
SSDVGGYNY

SEQ ID NO: 2328 - protein, 6 aa, Artificial sequence
  VL CDR1
QSISNY

SEQ ID NO: 2329 - protein, 11 aa, Artificial sequence
  VL CDR1
QSLVYSDGNTY

SEQ ID NO: 2330 - protein, 6 aa, Artificial sequence
  VL CDR1
KLGDKY

SEQ ID NO: 2331 - protein, 9 aa, Artificial sequence
  VL CDR1
SSDVGGHDY

SEQ ID NO: 2332 - protein, 9 aa, Artificial sequence
  VL CDR1
SSDVGGHDY

SEQ ID NO: 2333 - protein, 11 aa, Artificial sequence
  VL CDR1
QSLVYSDGNTY

SEQ ID NO: 2334 - protein, 8 aa, Artificial sequence
  VL CDR1
SSNIGNNY

SEQ ID NO: 2335 - protein, 6 aa, Artificial sequence
  VL CDR1
ALPKQY

SEQ ID NO: 2336 - protein, 6 aa, Artificial sequence
  VL CDR1
QSVSTY

SEQ ID NO: 2337 - protein, 6 aa, Artificial sequence
  VL CDR1
QSISSW

SEQ ID NO: 2338 - protein, 7 aa, Artificial sequence
  VL CDR1
VGHDYFT

SEQ ID NO: 2339 - protein, 6 aa, Artificial sequence
  VL CDR1
QDSNTY

SEQ ID NO: 2340 - protein, 9 aa, Artificial sequence
  VL CDR1
NSDVGGYNY

SEQ ID NO: 2341 - protein, 11 aa, Artificial sequence
  VL CDR1
QSLLHSNGYNY

SEQ ID NO: 2342 - protein, 6 aa, Artificial sequence
  VL CDR1
QSISSW

SEQ ID NO: 2343 - protein, 11 aa, Artificial sequence
  VL CDR1
QSLIYSDGNTY

SEQ ID NO: 2344 - protein, 7 aa, Artificial sequence
  VL CDR1
QSVSSSY

SEQ ID NO: 2345 - protein, 6 aa, Artificial sequence
  VL CDR1
QGISSW

SEQ ID NO: 2346 - protein, 6 aa, Artificial sequence
  VL CDR1
KLGDKY

SEQ ID NO: 2347 - protein, 6 aa, Artificial sequence
  VL CDR1
QSISTW

SEQ ID NO: 2348 - protein, 6 aa, Artificial sequence
  VL CDR1
QYVGDN

SEQ ID NO: 2349 - protein, 6 aa, Artificial sequence
  VL CDR1
QYIGDN

SEQ ID NO: 2350 - protein, 6 aa, Artificial sequence
  VL CDR1
ALPKKY

SEQ ID NO: 2351 - protein, 6 aa, Artificial sequence
  VL CDR1
QDVSIY

SEQ ID NO: 2352 - protein, 12 aa, Artificial sequence
  VL CDR1
QSVYDSSNSKNY

SEQ ID NO: 2353 - protein, 12 aa, Artificial sequence
  VL CDR1
QSVYDTSNSKNY

SEQ ID NO: 2354 - protein, 6 aa, Artificial sequence
  VL CDR1
QSVSTY

SEQ ID NO: 2355 - protein, 6 aa, Artificial sequence
  VL CDR1
QSVSSY

SEQ ID NO: 2356 - protein, 8 aa, Artificial sequence
  VL CDR1
SSNIGAYT

SEQ ID NO: 2357 - protein, 7 aa, Artificial sequence
  VL CDR1
QSVSSIY

SEQ ID NO: 2358 - protein, 6 aa, Artificial sequence
  VL CDR1
QSVTSY

SEQ ID NO: 2359 - protein, 6 aa, Artificial sequence
  VL CDR1
QSITNW

SEQ ID NO: 2360 - protein, 9 aa, Artificial sequence
  VL CDR1
SSDVGSYNL

SEQ ID NO: 2361 - protein, 6 aa, Artificial sequence
  VL CDR1
ALPKQY

SEQ ID NO: 2362 - protein, 7 aa, Artificial sequence
  VL CDR1
QSVSSRY

SEQ ID NO: 2363 - protein, 7 aa, Artificial sequence
  VL CDR1
QSVSSSY

SEQ ID NO: 2364 - protein, 11 aa, Artificial sequence
  VL CDR1
QSLLDSDGKTY

SEQ ID NO: 2365 - protein, 6 aa, Artificial sequence
  VL CDR1
QRVGSS

SEQ ID NO: 2366 - protein, 6 aa, Artificial sequence
  VL CDR1
QSVSSN

SEQ ID NO: 2367 - protein, 6 aa, Artificial sequence
  VL CDR1
QGIRFW

SEQ ID NO: 2368 - protein, 9 aa, Artificial sequence
  VL CDR1
SSNIGAGYD

SEQ ID NO: 2369 - protein, 6 aa, Artificial sequence
  VL CDR1
QSISSW

SEQ ID NO: 2370 - protein, 6 aa, Artificial sequence
  VL CDR1
QGISSY

SEQ ID NO: 2371 - protein, 12 aa, Artificial sequence
  VL CDR1
QSVLYSASNKNY

SEQ ID NO: 2372 - protein, 6 aa, Artificial sequence
  VL CDR1
QDISNY

SEQ ID NO: 2373 - protein, 11 aa, Artificial sequence
  VL CDR1
HSLLHSDGKTY

SEQ ID NO: 2374 - protein, 9 aa, Artificial sequence
  VL CDR1
TGAVTSGHY

SEQ ID NO: 2375 - protein, 9 aa, Artificial sequence
  VL CDR1
SSDVGGYNY

SEQ ID NO: 2376 - protein, 6 aa, Artificial sequence
  VL CDR1
QDISNY

SEQ ID NO: 2377 - protein, 9 aa, Artificial sequence
  VL CDR1
SSDVGGYNY

SEQ ID NO: 2378 - protein, 9 aa, Artificial sequence
  VL CDR1
SSDVGSYNL

SEQ ID NO: 2379 - protein, 6 aa, Artificial sequence
  VL CDR1
QSIGKY

SEQ ID NO: 2380 - protein, 11 aa, Artificial sequence
  VL CDR1
QSIEHSDGNIY

SEQ ID NO: 2381 - protein, 9 aa, Artificial sequence
  VL CDR1
SSNTGAGYD

SEQ ID NO: 2382 - protein, 7 aa, Artificial sequence
  VL CDR1
QSLTSSS

SEQ ID NO: 2383 - protein, 11 aa, Artificial sequence
  VL CDR1
QSLLHGNGYTY

SEQ ID NO: 2384 - protein, 6 aa, Artificial sequence
  VL CDR1
NIGSKS

SEQ ID NO: 2385 - protein, 7 aa, Artificial sequence
  VL CDR1
QSVSSSY

SEQ ID NO: 2386 - protein, 6 aa, Artificial sequence
  VL CDR1
QSVSSK

SEQ ID NO: 2387 - protein, 9 aa, Artificial sequence
  VL CDR1
TGAVTSGHY

SEQ ID NO: 2388 - protein, 6 aa, Artificial sequence
  VL CDR1
QSVTRN

SEQ ID NO: 2389 - protein, 8 aa, Artificial sequence
  VL CDR1
SSNIGSNT

SEQ ID NO: 2390 - protein, 9 aa, Artificial sequence
  VL CDR1
SSDVGGYNY

SEQ ID NO: 2391 - protein, 6 aa, Artificial sequence
  VL CDR1
NIGSKN

SEQ ID NO: 2392 - protein, 9 aa, Artificial sequence
  VL CDR1
SSDVGAYNY

SEQ ID NO: 2393 - protein, 6 aa, Artificial sequence
  VL CDR1
QSISNY

SEQ ID NO: 2394 - protein, 6 aa, Artificial sequence
  VL CDR1
QDISNY

SEQ ID NO: 2395 - protein, 8 aa, Artificial sequence
  VL CDR1
SSNVALNA

SEQ ID NO: 2396 - protein, 6 aa, Artificial sequence
  VL CDR1
QSVSSN

SEQ ID NO: 2397 - protein, 7 aa, Artificial sequence
  VL CDR1
SGYSNYK

SEQ ID NO: 2398 - protein, 9 aa, Artificial sequence
  VL CDR1
SSDVGSYNL

SEQ ID NO: 2399 - protein, 6 aa, Artificial sequence
  VL CDR1
QHINRW

SEQ ID NO: 2400 - protein, 6 aa, Artificial sequence
  VL CDR1
QNISRW

SEQ ID NO: 2401 - protein, 11 aa, Artificial sequence
  VL CDR1
QSLLHSDGKTY

SEQ ID NO: 2402 - protein, 6 aa, Artificial sequence
  VL CDR1
ALPIKY

SEQ ID NO: 2403 - protein, 6 aa, Artificial sequence
  VL CDR1
QSVSTY

SEQ ID NO: 2404 - protein, 6 aa, Artificial sequence
  VL CDR1
ELPKQY

SEQ ID NO: 2405 - protein, 8 aa, Artificial sequence
  VL CDR1
SSNIGNNY

SEQ ID NO: 2406 - protein, 6 aa, Artificial sequence
  VL CDR1
QNINVF

SEQ ID NO: 2407 - protein, 7 aa, Artificial sequence
  VL CDR1
QSLNNNQ

SEQ ID NO: 2408 - protein, 7 aa, Artificial sequence
  VL CDR1
QSLNNNQ

SEQ ID NO: 2409 - protein, 9 aa, Artificial sequence
  VL CDR1
SSNIGAGYD

SEQ ID NO: 2410 - protein, 6 aa, Artificial sequence
  VL CDR1
QSISSH

SEQ ID NO: 2411 - protein, 6 aa, Artificial sequence
  VL CDR1
QSVASY

SEQ ID NO: 2412 - protein, 8 aa, Artificial sequence
  VL CDR1
SSNIGSNT

SEQ ID NO: 2413 - protein, 11 aa, Artificial sequence
  VL CDR1
HSLLHNNGNTY

SEQ ID NO: 2414 - protein, 6 aa, Artificial sequence
  VL CDR1
ALPKEF

SEQ ID NO: 2415 - protein, 6 aa, Artificial sequence
  VL CDR1
KLGDKY

SEQ ID NO: 2416 - protein, 7 aa, Artificial sequence
  VL CDR1
QSVSSSY

SEQ ID NO: 2417 - protein, 6 aa, Artificial sequence
  VL CDR1
ALSKQY

SEQ ID NO: 2418 - protein, 11 aa, Artificial sequence
  VL CDR1
QSLLHNNGNTY

SEQ ID NO: 2419 - protein, 6 aa, Artificial sequence
  VL CDR1
QGIRNS

SEQ ID NO: 2420 - protein, 6 aa, Artificial sequence
  VL CDR1
QNISRW

SEQ ID NO: 2421 - protein, 6 aa, Artificial sequence
  VL CDR1
QNISRW

SEQ ID NO: 2422 - protein, 6 aa, Artificial sequence
  VL CDR1
ALPQRY

SEQ ID NO: 2423 - protein, 6 aa, Artificial sequence
  VL CDR1
QGVASY

SEQ ID NO: 2424 - protein, 6 aa, Artificial sequence
  VL CDR1
QNINVF

SEQ ID NO: 2425 - protein, 6 aa, Artificial sequence
  VL CDR1
QNINVF

SEQ ID NO: 2426 - protein, 6 aa, Artificial sequence
  VL CDR1
QSLNSN

SEQ ID NO: 2427 - protein, 9 aa, Artificial sequence
  VL CDR1
SSNIGAGYD

SEQ ID NO: 2428 - protein, 6 aa, Artificial sequence
  VL CDR1
KLGEKY

SEQ ID NO: 2429 - protein, 9 aa, Artificial sequence
  VL CDR1
SSNIGAGYD

SEQ ID NO: 2430 - protein, 6 aa, Artificial sequence
  VL CDR1
ALPKQN

SEQ ID NO: 2431 - protein, 6 aa, Artificial sequence
  VL CDR1
ETIASW

SEQ ID NO: 2432 - protein, 6 aa, Artificial sequence
  VL CDR1
KLGDKY

SEQ ID NO: 2433 - protein, 7 aa, Artificial sequence
  VL CDR1
QSVSSSY

SEQ ID NO: 2434 - protein, 7 aa, Artificial sequence
  VL CDR1
QSVSSSY

SEQ ID NO: 2435 - protein, 7 aa, Artificial sequence
  VL CDR1
QSISSSY

SEQ ID NO: 2436 - protein, 7 aa, Artificial sequence
  VL CDR1
QSVSSSY

SEQ ID NO: 2437 - protein, 9 aa, Artificial sequence
  VL CDR1
SSDVGSYNL

SEQ ID NO: 2438 - protein, 8 aa, Artificial sequence
  VL CDR1
SGSIASNY

SEQ ID NO: 2439 - protein, 8 aa, Artificial sequence
  VL CDR1
SSNIGNNY

SEQ ID NO: 2440 - protein, 6 aa, Artificial sequence
  VL CDR1
ALPEKY

SEQ ID NO: 2441 - protein, 6 aa, Artificial sequence
  VL CDR1
SLRSYY

SEQ ID NO: 2442 - protein, 9 aa, Artificial sequence
  VL CDR1
SSNIGAGYD

SEQ ID NO: 2443 - protein, 8 aa, Artificial sequence
  VL CDR1
SSNIGNNY

SEQ ID NO: 2444 - protein, 9 aa, Artificial sequence
  VL CDR1
SSDVGSYNL

SEQ ID NO: 2445 - protein, 8 aa, Artificial sequence
  VL CDR1
SSNIGNNY

SEQ ID NO: 2446 - protein, 6 aa, Artificial sequence
  VL CDR1
QGISSY

SEQ ID NO: 2447 - protein, 6 aa, Artificial sequence
  VL CDR1
QSIRFY

SEQ ID NO: 2448 - protein, 7 aa, Artificial sequence
  VL CDR1
QSVSSTY

SEQ ID NO: 2449 - protein, 6 aa, Artificial sequence
  VL CDR1
KLGDNY

SEQ ID NO: 2450 - protein, 6 aa, Artificial sequence
  VL CDR1
QDISNY

SEQ ID NO: 2451 - protein, 6 aa, Artificial sequence
  VL CDR1
QDISNY

SEQ ID NO: 2452 - protein, 6 aa, Artificial sequence
  VL CDR1
QSVSSY

SEQ ID NO: 2453 - protein, 6 aa, Artificial sequence
  VL CDR1
QGISNW

SEQ ID NO: 2454 - protein, 6 aa, Artificial sequence
  VL CDR1
QSISSY

SEQ ID NO: 2455 - protein, 9 aa, Artificial sequence
  VL CDR1
RSNIGAGFD

SEQ ID NO: 2456 - protein, 6 aa, Artificial sequence
  VL CDR1
QGISSA

SEQ ID NO: 2457 - protein, 6 aa, Artificial sequence
  VL CDR1
QDMSNY

SEQ ID NO: 2458 - protein, 9 aa, Artificial sequence
  VL CDR1
SSDVGGYNY

SEQ ID NO: 2459 - protein, 6 aa, Artificial sequence
  VL CDR1
SLRSYS

SEQ ID NO: 2460 - protein, 9 aa, Artificial sequence
  VL CDR1
SSDVGDYDY

SEQ ID NO: 2461 - protein, 9 aa, Artificial sequence
  VL CDR1
SSDVGGYNY

SEQ ID NO: 2462 - protein, 7 aa, Artificial sequence
  VL CDR1
QSVSSSY

SEQ ID NO: 2463 - protein, 6 aa, Artificial sequence
  VL CDR1
QSISSY

SEQ ID NO: 2464 - protein, 7 aa, Artificial sequence
  VL CDR1
QSVSSSY

SEQ ID NO: 2465 - protein, 6 aa, Artificial sequence
  VL CDR1
QSISSY

SEQ ID NO: 2466 - protein, 6 aa, Artificial sequence
  VL CDR1
KLGNKY

SEQ ID NO: 2467 - protein, 9 aa, Artificial sequence
  VL CDR1
SGDVGGYNY

SEQ ID NO: 2468 - protein, 6 aa, Artificial sequence
  VL CDR1
QSISSC

SEQ ID NO: 2469 - protein, 6 aa, Artificial sequence
  VL CDR1
QSVSSN

SEQ ID NO: 2470 - protein, 6 aa, Artificial sequence
  VL CDR1
QSINRN

SEQ ID NO: 2471 - protein, 6 aa, Artificial sequence
  VL CDR1
QSVNRN

SEQ ID NO: 2472 - protein, 9 aa, Artificial sequence
  VL CDR1
SGDVGGYNY

SEQ ID NO: 2473 - protein, 6 aa, Artificial sequence
  VL CDR1
QSISSF

SEQ ID NO: 2474 - protein, 9 aa, Artificial sequence
  VL CDR1
SSDVGGYNY

SEQ ID NO: 2475 - protein, 6 aa, Artificial sequence
  VL CDR1
QSISSY

SEQ ID NO: 2476 - protein, 11 aa, Artificial sequence
  VL CDR1
QSLLHSNGYNY

SEQ ID NO: 2477 - protein, 11 aa, Artificial sequence
  VL CDR1
QSLLHSNGYNY

SEQ ID NO: 2478 - protein, 6 aa, Artificial sequence
  VL CDR1
QSISSW

SEQ ID NO: 2479 - protein, 6 aa, Artificial sequence
  VL CDR1
KLGKKY

SEQ ID NO: 2480 - protein, 9 aa, Artificial sequence
  VL CDR1
SSNIGAGYD

SEQ ID NO: 2481 - protein, 9 aa, Artificial sequence
  VL CDR1
TFDVGVYDF

SEQ ID NO: 2482 - protein, 11 aa, Artificial sequence
  VL CDR1
QSLLHSNGNYY

SEQ ID NO: 2483 - protein, 6 aa, Artificial sequence
  VL CDR1
NIGSKS

SEQ ID NO: 2484 - protein, 8 aa, Artificial sequence
  VL CDR1
SSNIGNNY

SEQ ID NO: 2485 - protein, 7 aa, Artificial sequence
  VL CDR1
QSVSSSY

SEQ ID NO: 2486 - protein, 6 aa, Artificial sequence
  VL CDR1
QSISSW

SEQ ID NO: 2487 - protein, 6 aa, Artificial sequence
  VL CDR1
QSISDW

SEQ ID NO: 2488 - protein, 9 aa, Artificial sequence
  VL CDR1
SSNIGAGYD

SEQ ID NO: 2489 - protein, 6 aa, Artificial sequence
  VL CDR1
ALPKQY

SEQ ID NO: 2490 - protein, 7 aa, Artificial sequence
  VL CDR1
QSVSSSY

SEQ ID NO: 2491 - protein, 9 aa, Artificial sequence
  VL CDR1
NSDINSYDY

SEQ ID NO: 2492 - protein, 6 aa, Artificial sequence
  VL CDR1
QGISNY

SEQ ID NO: 2493 - protein, 6 aa, Artificial sequence
  VL CDR1
NIGSKS

SEQ ID NO: 2494 - protein, 6 aa, Artificial sequence
  VL CDR1
QSISSY

SEQ ID NO: 2495 - protein, 6 aa, Artificial sequence
  VL CDR1
QSISSW

SEQ ID NO: 2496 - protein, 6 aa, Artificial sequence
  VL CDR1
NIGSKS

SEQ ID NO: 2497 - protein, 8 aa, Artificial sequence
  VL CDR1
SSNIGNNY

SEQ ID NO: 2498 - protein, 7 aa, Artificial sequence
  VL CDR1
SGHSSYV

SEQ ID NO: 2499 - protein, 6 aa, Artificial sequence
  VL CDR1
QDISNY

SEQ ID NO: 2500 - protein, 6 aa, Artificial sequence
  VL CDR1
NIGSKS

SEQ ID NO: 2501 - protein, 6 aa, Artificial sequence
  VL CDR1
QSVSNY

SEQ ID NO: 2502 - protein, 6 aa, Artificial sequence
  VL CDR1
QDISNY

SEQ ID NO: 2503 - protein, 7 aa, Artificial sequence
  VL CDR1
QSVSSSY

SEQ ID NO: 2504 - protein, 7 aa, Artificial sequence
  VL CDR1
QSVSSSY

SEQ ID NO: 2505 - protein, 9 aa, Artificial sequence
  VL CDR1
TGAVTSGYY

SEQ ID NO: 2506 - protein, 6 aa, Artificial sequence
  VL CDR1
QGISSY

SEQ ID NO: 2507 - protein, 6 aa, Artificial sequence
  VL CDR1
QDISNY

SEQ ID NO: 2508 - protein, 9 aa, Artificial sequence
  VL CDR1
SSDVGSYNL

SEQ ID NO: 2509 - protein, 8 aa, Artificial sequence
  VL CDR1
SGSIASNY

SEQ ID NO: 2510 - protein, 6 aa, Artificial sequence
  VL CDR1
QSVSSY

SEQ ID NO: 2511 - protein, 8 aa, Artificial sequence
  VL CDR1
SSNIGNNY

SEQ ID NO: 2512 - protein, 11 aa, Artificial sequence
  VL CDR1
RSLVHTNGNTY

SEQ ID NO: 2513 - protein, 9 aa, Artificial sequence
  VL CDR1
FSDIGNYDL

SEQ ID NO: 2514 - protein, 7 aa, Artificial sequence
  VL CDR1
QSVSSSY

SEQ ID NO: 2515 - protein, 8 aa, Artificial sequence
  VL CDR1
SSNIGNNY

SEQ ID NO: 2516 - protein, 6 aa, Artificial sequence
  VL CDR1
QSVSNY

SEQ ID NO: 2517 - protein, 6 aa, Artificial sequence
  VL CDR1
QSVSSY

SEQ ID NO: 2518 - protein, 7 aa, Artificial sequence
  VL CDR1
QSVNSNY

SEQ ID NO: 2519 - protein, 6 aa, Artificial sequence
  VL CDR1
QGISSS

SEQ ID NO: 2520 - protein, 9 aa, Artificial sequence
  VL CDR1
SSDVGTYNL

SEQ ID NO: 2521 - protein, 6 aa, Artificial sequence
  VL CDR1
QSIAKF

SEQ ID NO: 2522 - protein, 6 aa, Artificial sequence
  VL CDR1
QGISSW

SEQ ID NO: 2523 - protein, 6 aa, Artificial sequence
  VL CDR1
QGISSA

SEQ ID NO: 2524 - protein, 9 aa, Artificial sequence
  VL CDR1
NSNIGAGYD

SEQ ID NO: 2525 - protein, 6 aa, Artificial sequence
  VL CDR1
QIISSW

SEQ ID NO: 2526 - protein, 11 aa, Artificial sequence
  VL CDR1
HSLVYSDGYTH

SEQ ID NO: 2527 - protein, 8 aa, Artificial sequence
  VL CDR1
SSNIGSNT

SEQ ID NO: 2528 - protein, 9 aa, Artificial sequence
  VL CDR1
SSDVGGYNY

SEQ ID NO: 2529 - protein, 6 aa, Artificial sequence
  VL CDR1
QGISSY

SEQ ID NO: 2530 - protein, 6 aa, Artificial sequence
  VL CDR1
QDISNY

SEQ ID NO: 2531 - protein, 6 aa, Artificial sequence
  VL CDR1
QGISSY

SEQ ID NO: 2532 - protein, 6 aa, Artificial sequence
  VL CDR1
QSISNF

SEQ ID NO: 2533 - protein, 6 aa, Artificial sequence
  VL CDR1
QDISNY

SEQ ID NO: 2534 - protein, 6 aa, Artificial sequence
  VL CDR1
QSISSY

SEQ ID NO: 2535 - protein, 6 aa, Artificial sequence
  VL CDR1
QGISSY

SEQ ID NO: 2536 - protein, 6 aa, Artificial sequence
  VL CDR1
QDIINY

SEQ ID NO: 2537 - protein, 6 aa, Artificial sequence
  VL CDR1
QGISSY

SEQ ID NO: 2538 - protein, 6 aa, Artificial sequence
  VL CDR1
QGISSY

SEQ ID NO: 2539 - protein, 6 aa, Artificial sequence
  VL CDR1
QSISSY

SEQ ID NO: 2540 - protein, 6 aa, Artificial sequence
  VL CDR1
QDINKY

SEQ ID NO: 2541 - protein, 3 aa, Artificial sequence
  VL CDR2
AAS

SEQ ID NO: 2542 - protein, 3 aa, Artificial sequence
  VL CDR2
AAS

SEQ ID NO: 2543 - protein, 3 aa, Artificial sequence
  VL CDR2
EVS

SEQ ID NO: 2544 - protein, 3 aa, Artificial sequence
  VL CDR2
KAS

SEQ ID NO: 2545 - protein, 3 aa, Artificial sequence
  VL CDR2
AAS

SEQ ID NO: 2546 - protein, 3 aa, Artificial sequence
  VL CDR2
DAS

SEQ ID NO: 2547 - protein, 3 aa, Artificial sequence
  VL CDR2
GAS

SEQ ID NO: 2548 - protein, 3 aa, Artificial sequence
  VL CDR2
RSN

SEQ ID NO: 2549 - protein, 7 aa, Artificial sequence
  VL CDR2
LSSDGSH

SEQ ID NO: 2550 - protein, 3 aa, Artificial sequence
  VL CDR2
KDS

SEQ ID NO: 2551 - protein, 3 aa, Artificial sequence
  VL CDR2
EAA

SEQ ID NO: 2552 - protein, 3 aa, Artificial sequence
  VL CDR2
DAS

SEQ ID NO: 2553 - protein, 3 aa, Artificial sequence
  VL CDR2
EVN

SEQ ID NO: 2554 - protein, 3 aa, Artificial sequence
  VL CDR2
GDQ

SEQ ID NO: 2555 - protein, 3 aa, Artificial sequence
  VL CDR2
KVS

SEQ ID NO: 2556 - protein, 3 aa, Artificial sequence
  VL CDR2
KAS

SEQ ID NO: 2557 - protein, 3 aa, Artificial sequence
  VL CDR2
AAS

SEQ ID NO: 2558 - protein, 3 aa, Artificial sequence
  VL CDR2
KDS

SEQ ID NO: 2559 - protein, 3 aa, Artificial sequence
  VL CDR2
WAS

SEQ ID NO: 2560 - protein, 3 aa, Artificial sequence
  VL CDR2
EDT

SEQ ID NO: 2561 - protein, 3 aa, Artificial sequence
  VL CDR2
WAS

SEQ ID NO: 2562 - protein, 3 aa, Artificial sequence
  VL CDR2
WAS

SEQ ID NO: 2563 - protein, 3 aa, Artificial sequence
  VL CDR2
KAS

SEQ ID NO: 2564 - protein, 3 aa, Artificial sequence
  VL CDR2
DVS

SEQ ID NO: 2565 - protein, 3 aa, Artificial sequence
  VL CDR2
KDS

SEQ ID NO: 2566 - protein, 3 aa, Artificial sequence
  VL CDR2
DVS

SEQ ID NO: 2567 - protein, 3 aa, Artificial sequence
  VL CDR2
GAS

SEQ ID NO: 2568 - protein, 3 aa, Artificial sequence
  VL CDR2
GAS

SEQ ID NO: 2569 - protein, 3 aa, Artificial sequence
  VL CDR2
DAS

SEQ ID NO: 2570 - protein, 3 aa, Artificial sequence
  VL CDR2
GAS

SEQ ID NO: 2571 - protein, 3 aa, Artificial sequence
  VL CDR2
SNN

SEQ ID NO: 2572 - protein, 3 aa, Artificial sequence
  VL CDR2
EVS

SEQ ID NO: 2573 - protein, 3 aa, Artificial sequence
  VL CDR2
WAS

SEQ ID NO: 2574 - protein, 3 aa, Artificial sequence
  VL CDR2
GAS

SEQ ID NO: 2575 - protein, 3 aa, Artificial sequence
  VL CDR2
DAS

SEQ ID NO: 2576 - protein, 3 aa, Artificial sequence
  VL CDR2
WAS

SEQ ID NO: 2577 - protein, 3 aa, Artificial sequence
  VL CDR2
AAS

SEQ ID NO: 2578 - protein, 3 aa, Artificial sequence
  VL CDR2
KGT

SEQ ID NO: 2579 - protein, 3 aa, Artificial sequence
  VL CDR2
DAS

SEQ ID NO: 2580 - protein, 3 aa, Artificial sequence
  VL CDR2
AAS

SEQ ID NO: 2581 - protein, 3 aa, Artificial sequence
  VL CDR2
DAS

SEQ ID NO: 2582 - protein, 3 aa, Artificial sequence
  VL CDR2
KNN

SEQ ID NO: 2583 - protein, 3 aa, Artificial sequence
  VL CDR2
ATS

SEQ ID NO: 2584 - protein, 3 aa, Artificial sequence
  VL CDR2
RNT

SEQ ID NO: 2585 - protein, 3 aa, Artificial sequence
  VL CDR2
SAS

SEQ ID NO: 2586 - protein, 3 aa, Artificial sequence
  VL CDR2
ASS

SEQ ID NO: 2587 - protein, 3 aa, Artificial sequence
  VL CDR2
STS

SEQ ID NO: 2588 - protein, 3 aa, Artificial sequence
  VL CDR2
ATS

SEQ ID NO: 2589 - protein, 3 aa, Artificial sequence
  VL CDR2
EDS

SEQ ID NO: 2590 - protein, 3 aa, Artificial sequence
  VL CDR2
DIN

SEQ ID NO: 2591 - protein, 3 aa, Artificial sequence
  VL CDR2
GNS

SEQ ID NO: 2592 - protein, 3 aa, Artificial sequence
  VL CDR2
QDS

SEQ ID NO: 2593 - protein, 3 aa, Artificial sequence
  VL CDR2
DNN

SEQ ID NO: 2594 - protein, 3 aa, Artificial sequence
  VL CDR2
GAS

SEQ ID NO: 2595 - protein, 3 aa, Artificial sequence
  VL CDR2
DTS

SEQ ID NO: 2596 - protein, 3 aa, Artificial sequence
  VL CDR2
AAS

SEQ ID NO: 2597 - protein, 3 aa, Artificial sequence
  VL CDR2
DVS

SEQ ID NO: 2598 - protein, 3 aa, Artificial sequence
  VL CDR2
WAS

SEQ ID NO: 2599 - protein, 3 aa, Artificial sequence
  VL CDR2
GAS

SEQ ID NO: 2600 - protein, 3 aa, Artificial sequence
  VL CDR2
DNN

SEQ ID NO: 2601 - protein, 3 aa, Artificial sequence
  VL CDR2
DVS

SEQ ID NO: 2602 - protein, 3 aa, Artificial sequence
  VL CDR2
LGS

SEQ ID NO: 2603 - protein, 3 aa, Artificial sequence
  VL CDR2
LGS

SEQ ID NO: 2604 - protein, 3 aa, Artificial sequence
  VL CDR2
LGS

SEQ ID NO: 2605 - protein, 3 aa, Artificial sequence
  VL CDR2
AAS

SEQ ID NO: 2606 - protein, 3 aa, Artificial sequence
  VL CDR2
AAS

SEQ ID NO: 2607 - protein, 3 aa, Artificial sequence
  VL CDR2
YDS

SEQ ID NO: 2608 - protein, 3 aa, Artificial sequence
  VL CDR2
QNN

SEQ ID NO: 2609 - protein, 3 aa, Artificial sequence
  VL CDR2
DNN

SEQ ID NO: 2610 - protein, 3 aa, Artificial sequence
  VL CDR2
DVS

SEQ ID NO: 2611 - protein, 3 aa, Artificial sequence
  VL CDR2
GAS

SEQ ID NO: 2612 - protein, 3 aa, Artificial sequence
  VL CDR2
AAS

SEQ ID NO: 2613 - protein, 3 aa, Artificial sequence
  VL CDR2
KAS

SEQ ID NO: 2614 - protein, 3 aa, Artificial sequence
  VL CDR2
KAS

SEQ ID NO: 2615 - protein, 3 aa, Artificial sequence
  VL CDR2
GAS

SEQ ID NO: 2616 - protein, 3 aa, Artificial sequence
  VL CDR2
RND

SEQ ID NO: 2617 - protein, 3 aa, Artificial sequence
  VL CDR2
WAS

SEQ ID NO: 2618 - protein, 3 aa, Artificial sequence
  VL CDR2
EDN

SEQ ID NO: 2619 - protein, 3 aa, Artificial sequence
  VL CDR2
STN

SEQ ID NO: 2620 - protein, 3 aa, Artificial sequence
  VL CDR2
AAS

SEQ ID NO: 2621 - protein, 3 aa, Artificial sequence
  VL CDR2
KVS

SEQ ID NO: 2622 - protein, 3 aa, Artificial sequence
  VL CDR2
DNN

SEQ ID NO: 2623 - protein, 3 aa, Artificial sequence
  VL CDR2
RNN

SEQ ID NO: 2624 - protein, 3 aa, Artificial sequence
  VL CDR2
KVS

SEQ ID NO: 2625 - protein, 3 aa, Artificial sequence
  VL CDR2
KVS

SEQ ID NO: 2626 - protein, 3 aa, Artificial sequence
  VL CDR2
GAS

SEQ ID NO: 2627 - protein, 3 aa, Artificial sequence
  VL CDR2
LNS

SEQ ID NO: 2628 - protein, 3 aa, Artificial sequence
  VL CDR2
EVS

SEQ ID NO: 2629 - protein, 3 aa, Artificial sequence
  VL CDR2
TAF

SEQ ID NO: 2630 - protein, 3 aa, Artificial sequence
  VL CDR2
AAS

SEQ ID NO: 2631 - protein, 3 aa, Artificial sequence
  VL CDR2
GKN

SEQ ID NO: 2632 - protein, 3 aa, Artificial sequence
  VL CDR2
EKN

SEQ ID NO: 2633 - protein, 3 aa, Artificial sequence
  VL CDR2
EVS

SEQ ID NO: 2634 - protein, 3 aa, Artificial sequence
  VL CDR2
GNS

SEQ ID NO: 2635 - protein, 3 aa, Artificial sequence
  VL CDR2
WAS

SEQ ID NO: 2636 - protein, 3 aa, Artificial sequence
  VL CDR2
KVS

SEQ ID NO: 2637 - protein, 3 aa, Artificial sequence
  VL CDR2
DVS

SEQ ID NO: 2638 - protein, 3 aa, Artificial sequence
  VL CDR2
AAS

SEQ ID NO: 2639 - protein, 3 aa, Artificial sequence
  VL CDR2
DVS

SEQ ID NO: 2640 - protein, 3 aa, Artificial sequence
  VL CDR2
AAS

SEQ ID NO: 2641 - protein, 3 aa, Artificial sequence
  VL CDR2
GKN

SEQ ID NO: 2642 - protein, 3 aa, Artificial sequence
  VL CDR2
QDT

SEQ ID NO: 2643 - protein, 3 aa, Artificial sequence
  VL CDR2
KAS

SEQ ID NO: 2644 - protein, 3 aa, Artificial sequence
  VL CDR2
KIS

SEQ ID NO: 2645 - protein, 3 aa, Artificial sequence
  VL CDR2
AAS

SEQ ID NO: 2646 - protein, 3 aa, Artificial sequence
  VL CDR2
GNN

SEQ ID NO: 2647 - protein, 3 aa, Artificial sequence
  VL CDR2
RNN

SEQ ID NO: 2648 - protein, 3 aa, Artificial sequence
  VL CDR2
GKN

SEQ ID NO: 2649 - protein, 3 aa, Artificial sequence
  VL CDR2
DAS

SEQ ID NO: 2650 - protein, 3 aa, Artificial sequence
  VL CDR2
DNN

SEQ ID NO: 2651 - protein, 3 aa, Artificial sequence
  VL CDR2
GAS

SEQ ID NO: 2652 - protein, 3 aa, Artificial sequence
  VL CDR2
QDS

SEQ ID NO: 2653 - protein, 3 aa, Artificial sequence
  VL CDR2
ATS

SEQ ID NO: 2654 - protein, 3 aa, Artificial sequence
  VL CDR2
ATS

SEQ ID NO: 2655 - protein, 3 aa, Artificial sequence
  VL CDR2
ATS

SEQ ID NO: 2656 - protein, 3 aa, Artificial sequence
  VL CDR2
AAS

SEQ ID NO: 2657 - protein, 3 aa, Artificial sequence
  VL CDR2
GAS

SEQ ID NO: 2658 - protein, 3 aa, Artificial sequence
  VL CDR2
KDS

SEQ ID NO: 2659 - protein, 3 aa, Artificial sequence
  VL CDR2
AAS

SEQ ID NO: 2660 - protein, 3 aa, Artificial sequence
  VL CDR2
QDN

SEQ ID NO: 2661 - protein, 3 aa, Artificial sequence
  VL CDR2
EVS

SEQ ID NO: 2662 - protein, 3 aa, Artificial sequence
  VL CDR2
EVS

SEQ ID NO: 2663 - protein, 3 aa, Artificial sequence
  VL CDR2
LGS

SEQ ID NO: 2664 - protein, 3 aa, Artificial sequence
  VL CDR2
EDS

SEQ ID NO: 2665 - protein, 3 aa, Artificial sequence
  VL CDR2
DVS

SEQ ID NO: 2666 - protein, 3 aa, Artificial sequence
  VL CDR2
EDS

SEQ ID NO: 2667 - protein, 3 aa, Artificial sequence
  VL CDR2
KAS

SEQ ID NO: 2668 - protein, 3 aa, Artificial sequence
  VL CDR2
DAS

SEQ ID NO: 2669 - protein, 3 aa, Artificial sequence
  VL CDR2
AAS

SEQ ID NO: 2670 - protein, 3 aa, Artificial sequence
  VL CDR2
GAS

SEQ ID NO: 2671 - protein, 3 aa, Artificial sequence
  VL CDR2
GAS

SEQ ID NO: 2672 - protein, 3 aa, Artificial sequence
  VL CDR2
GAS

SEQ ID NO: 2673 - protein, 3 aa, Artificial sequence
  VL CDR2
WAS

SEQ ID NO: 2674 - protein, 3 aa, Artificial sequence
  VL CDR2
EVS

SEQ ID NO: 2675 - protein, 3 aa, Artificial sequence
  VL CDR2
EVS

SEQ ID NO: 2676 - protein, 3 aa, Artificial sequence
  VL CDR2
LGS

SEQ ID NO: 2677 - protein, 3 aa, Artificial sequence
  VL CDR2
GSS

SEQ ID NO: 2678 - protein, 3 aa, Artificial sequence
  VL CDR2
GAS

SEQ ID NO: 2679 - protein, 3 aa, Artificial sequence
  VL CDR2
DAS

SEQ ID NO: 2680 - protein, 3 aa, Artificial sequence
  VL CDR2
WAS

SEQ ID NO: 2681 - protein, 3 aa, Artificial sequence
  VL CDR2
EVS

SEQ ID NO: 2682 - protein, 3 aa, Artificial sequence
  VL CDR2
DAS

SEQ ID NO: 2683 - protein, 3 aa, Artificial sequence
  VL CDR2
GAS

SEQ ID NO: 2684 - protein, 3 aa, Artificial sequence
  VL CDR2
EVS

SEQ ID NO: 2685 - protein, 3 aa, Artificial sequence
  VL CDR2
AAS

SEQ ID NO: 2686 - protein, 3 aa, Artificial sequence
  VL CDR2
KDS

SEQ ID NO: 2687 - protein, 3 aa, Artificial sequence
  VL CDR2
DVS

SEQ ID NO: 2688 - protein, 3 aa, Artificial sequence
  VL CDR2
AAS

SEQ ID NO: 2689 - protein, 3 aa, Artificial sequence
  VL CDR2
KVS

SEQ ID NO: 2690 - protein, 3 aa, Artificial sequence
  VL CDR2
QDS

SEQ ID NO: 2691 - protein, 3 aa, Artificial sequence
  VL CDR2
DVT

SEQ ID NO: 2692 - protein, 3 aa, Artificial sequence
  VL CDR2
DVT

SEQ ID NO: 2693 - protein, 3 aa, Artificial sequence
  VL CDR2
KVS

SEQ ID NO: 2694 - protein, 3 aa, Artificial sequence
  VL CDR2
DNN

SEQ ID NO: 2695 - protein, 3 aa, Artificial sequence
  VL CDR2
KDN

SEQ ID NO: 2696 - protein, 3 aa, Artificial sequence
  VL CDR2
GSS

SEQ ID NO: 2697 - protein, 3 aa, Artificial sequence
  VL CDR2
ETS

SEQ ID NO: 2698 - protein, 7 aa, Artificial sequence
  VL CDR2
LEGSGSY

SEQ ID NO: 2699 - protein, 3 aa, Artificial sequence
  VL CDR2
DAS

SEQ ID NO: 2700 - protein, 3 aa, Artificial sequence
  VL CDR2
DVS

SEQ ID NO: 2701 - protein, 3 aa, Artificial sequence
  VL CDR2
LGS

SEQ ID NO: 2702 - protein, 3 aa, Artificial sequence
  VL CDR2
KAS

SEQ ID NO: 2703 - protein, 3 aa, Artificial sequence
  VL CDR2
KVS

SEQ ID NO: 2704 - protein, 3 aa, Artificial sequence
  VL CDR2
GAS

SEQ ID NO: 2705 - protein, 3 aa, Artificial sequence
  VL CDR2
AAS

SEQ ID NO: 2706 - protein, 3 aa, Artificial sequence
  VL CDR2
QDS

SEQ ID NO: 2707 - protein, 3 aa, Artificial sequence
  VL CDR2
KAS

SEQ ID NO: 2708 - protein, 3 aa, Artificial sequence
  VL CDR2
GAF

SEQ ID NO: 2709 - protein, 3 aa, Artificial sequence
  VL CDR2
GAS

SEQ ID NO: 2710 - protein, 3 aa, Artificial sequence
  VL CDR2
EDS

SEQ ID NO: 2711 - protein, 3 aa, Artificial sequence
  VL CDR2
DAY

SEQ ID NO: 2712 - protein, 3 aa, Artificial sequence
  VL CDR2
WAS

SEQ ID NO: 2713 - protein, 3 aa, Artificial sequence
  VL CDR2
WAS

SEQ ID NO: 2714 - protein, 3 aa, Artificial sequence
  VL CDR2
DAS

SEQ ID NO: 2715 - protein, 3 aa, Artificial sequence
  VL CDR2
DAS

SEQ ID NO: 2716 - protein, 3 aa, Artificial sequence
  VL CDR2
STD

SEQ ID NO: 2717 - protein, 3 aa, Artificial sequence
  VL CDR2
GAS

SEQ ID NO: 2718 - protein, 3 aa, Artificial sequence
  VL CDR2
GAS

SEQ ID NO: 2719 - protein, 3 aa, Artificial sequence
  VL CDR2
KAS

SEQ ID NO: 2720 - protein, 3 aa, Artificial sequence
  VL CDR2
EVS

SEQ ID NO: 2721 - protein, 3 aa, Artificial sequence
  VL CDR2
KDS

SEQ ID NO: 2722 - protein, 3 aa, Artificial sequence
  VL CDR2
GAS

SEQ ID NO: 2723 - protein, 3 aa, Artificial sequence
  VL CDR2
GAS

SEQ ID NO: 2724 - protein, 3 aa, Artificial sequence
  VL CDR2
EVS

SEQ ID NO: 2725 - protein, 3 aa, Artificial sequence
  VL CDR2
GAS

SEQ ID NO: 2726 - protein, 3 aa, Artificial sequence
  VL CDR2
GAS

SEQ ID NO: 2727 - protein, 3 aa, Artificial sequence
  VL CDR2
AAS

SEQ ID NO: 2728 - protein, 3 aa, Artificial sequence
  VL CDR2
GNT

SEQ ID NO: 2729 - protein, 3 aa, Artificial sequence
  VL CDR2
DAS

SEQ ID NO: 2730 - protein, 3 aa, Artificial sequence
  VL CDR2
AAS

SEQ ID NO: 2731 - protein, 3 aa, Artificial sequence
  VL CDR2
WAS

SEQ ID NO: 2732 - protein, 3 aa, Artificial sequence
  VL CDR2
AAS

SEQ ID NO: 2733 - protein, 3 aa, Artificial sequence
  VL CDR2
ELF

SEQ ID NO: 2734 - protein, 3 aa, Artificial sequence
  VL CDR2
DTN

SEQ ID NO: 2735 - protein, 3 aa, Artificial sequence
  VL CDR2
EVS

SEQ ID NO: 2736 - protein, 3 aa, Artificial sequence
  VL CDR2
DAS

SEQ ID NO: 2737 - protein, 3 aa, Artificial sequence
  VL CDR2
DVN

SEQ ID NO: 2738 - protein, 3 aa, Artificial sequence
  VL CDR2
EVS

SEQ ID NO: 2739 - protein, 3 aa, Artificial sequence
  VL CDR2
AAS

SEQ ID NO: 2740 - protein, 3 aa, Artificial sequence
  VL CDR2
KIS

SEQ ID NO: 2741 - protein, 3 aa, Artificial sequence
  VL CDR2
DNS

SEQ ID NO: 2742 - protein, 3 aa, Artificial sequence
  VL CDR2
GAS

SEQ ID NO: 2743 - protein, 3 aa, Artificial sequence
  VL CDR2
LGS

SEQ ID NO: 2744 - protein, 3 aa, Artificial sequence
  VL CDR2
DDS

SEQ ID NO: 2745 - protein, 3 aa, Artificial sequence
  VL CDR2
GAS

SEQ ID NO: 2746 - protein, 3 aa, Artificial sequence
  VL CDR2
GAS

SEQ ID NO: 2747 - protein, 3 aa, Artificial sequence
  VL CDR2
DTS

SEQ ID NO: 2748 - protein, 3 aa, Artificial sequence
  VL CDR2
GAS

SEQ ID NO: 2749 - protein, 3 aa, Artificial sequence
  VL CDR2
SNN

SEQ ID NO: 2750 - protein, 3 aa, Artificial sequence
  VL CDR2
EVS

SEQ ID NO: 2751 - protein, 3 aa, Artificial sequence
  VL CDR2
DDG

SEQ ID NO: 2752 - protein, 3 aa, Artificial sequence
  VL CDR2
DVT

SEQ ID NO: 2753 - protein, 3 aa, Artificial sequence
  VL CDR2
AAS

SEQ ID NO: 2754 - protein, 3 aa, Artificial sequence
  VL CDR2
DAS

SEQ ID NO: 2755 - protein, 3 aa, Artificial sequence
  VL CDR2
RDN

SEQ ID NO: 2756 - protein, 3 aa, Artificial sequence
  VL CDR2
GAS

SEQ ID NO: 2757 - protein, 8 aa, Artificial sequence
  VL CDR2
VGTGGIVG

SEQ ID NO: 2758 - protein, 3 aa, Artificial sequence
  VL CDR2
EVS

SEQ ID NO: 2759 - protein, 3 aa, Artificial sequence
  VL CDR2
EAS

SEQ ID NO: 2760 - protein, 3 aa, Artificial sequence
  VL CDR2
KAS

SEQ ID NO: 2761 - protein, 3 aa, Artificial sequence
  VL CDR2
EVS

SEQ ID NO: 2762 - protein, 3 aa, Artificial sequence
  VL CDR2
EDS

SEQ ID NO: 2763 - protein, 3 aa, Artificial sequence
  VL CDR2
DAS

SEQ ID NO: 2764 - protein, 3 aa, Artificial sequence
  VL CDR2
KDR

SEQ ID NO: 2765 - protein, 3 aa, Artificial sequence
  VL CDR2
DNN

SEQ ID NO: 2766 - protein, 3 aa, Artificial sequence
  VL CDR2
AAS

SEQ ID NO: 2767 - protein, 3 aa, Artificial sequence
  VL CDR2
GAS

SEQ ID NO: 2768 - protein, 3 aa, Artificial sequence
  VL CDR2
GAS

SEQ ID NO: 2769 - protein, 3 aa, Artificial sequence
  VL CDR2
GNS

SEQ ID NO: 2770 - protein, 3 aa, Artificial sequence
  VL CDR2
DAS

SEQ ID NO: 2771 - protein, 3 aa, Artificial sequence
  VL CDR2
DAS

SEQ ID NO: 2772 - protein, 3 aa, Artificial sequence
  VL CDR2
SNN

SEQ ID NO: 2773 - protein, 3 aa, Artificial sequence
  VL CDR2
EIS

SEQ ID NO: 2774 - protein, 3 aa, Artificial sequence
  VL CDR2
KDK

SEQ ID NO: 2775 - protein, 3 aa, Artificial sequence
  VL CDR2
QDN

SEQ ID NO: 2776 - protein, 3 aa, Artificial sequence
  VL CDR2
GAS

SEQ ID NO: 2777 - protein, 3 aa, Artificial sequence
  VL CDR2
KDS

SEQ ID NO: 2778 - protein, 3 aa, Artificial sequence
  VL CDR2
EIS

SEQ ID NO: 2779 - protein, 3 aa, Artificial sequence
  VL CDR2
DAS

SEQ ID NO: 2780 - protein, 3 aa, Artificial sequence
  VL CDR2
KAS

SEQ ID NO: 2781 - protein, 3 aa, Artificial sequence
  VL CDR2
KAS

SEQ ID NO: 2782 - protein, 3 aa, Artificial sequence
  VL CDR2
EDT

SEQ ID NO: 2783 - protein, 3 aa, Artificial sequence
  VL CDR2
AAS

SEQ ID NO: 2784 - protein, 3 aa, Artificial sequence
  VL CDR2
GAS

SEQ ID NO: 2785 - protein, 3 aa, Artificial sequence
  VL CDR2
GAS

SEQ ID NO: 2786 - protein, 3 aa, Artificial sequence
  VL CDR2
GAS

SEQ ID NO: 2787 - protein, 3 aa, Artificial sequence
  VL CDR2
GNN

SEQ ID NO: 2788 - protein, 3 aa, Artificial sequence
  VL CDR2
QDT

SEQ ID NO: 2789 - protein, 3 aa, Artificial sequence
  VL CDR2
GDS

SEQ ID NO: 2790 - protein, 3 aa, Artificial sequence
  VL CDR2
KDT

SEQ ID NO: 2791 - protein, 3 aa, Artificial sequence
  VL CDR2
KAS

SEQ ID NO: 2792 - protein, 3 aa, Artificial sequence
  VL CDR2
QDS

SEQ ID NO: 2793 - protein, 3 aa, Artificial sequence
  VL CDR2
GAS

SEQ ID NO: 2794 - protein, 3 aa, Artificial sequence
  VL CDR2
GAS

SEQ ID NO: 2795 - protein, 3 aa, Artificial sequence
  VL CDR2
GAS

SEQ ID NO: 2796 - protein, 3 aa, Artificial sequence
  VL CDR2
GAS

SEQ ID NO: 2797 - protein, 3 aa, Artificial sequence
  VL CDR2
EVS

SEQ ID NO: 2798 - protein, 3 aa, Artificial sequence
  VL CDR2
EDN

SEQ ID NO: 2799 - protein, 3 aa, Artificial sequence
  VL CDR2
DNN

SEQ ID NO: 2800 - protein, 3 aa, Artificial sequence
  VL CDR2
EDN

SEQ ID NO: 2801 - protein, 3 aa, Artificial sequence
  VL CDR2
GKN

SEQ ID NO: 2802 - protein, 3 aa, Artificial sequence
  VL CDR2
GNS

SEQ ID NO: 2803 - protein, 3 aa, Artificial sequence
  VL CDR2
DNN

SEQ ID NO: 2804 - protein, 3 aa, Artificial sequence
  VL CDR2
EGS

SEQ ID NO: 2805 - protein, 3 aa, Artificial sequence
  VL CDR2
DNN

SEQ ID NO: 2806 - protein, 3 aa, Artificial sequence
  VL CDR2
AAS

SEQ ID NO: 2807 - protein, 3 aa, Artificial sequence
  VL CDR2
AAS

SEQ ID NO: 2808 - protein, 3 aa, Artificial sequence
  VL CDR2
DAS

SEQ ID NO: 2809 - protein, 3 aa, Artificial sequence
  VL CDR2
QDT

SEQ ID NO: 2810 - protein, 3 aa, Artificial sequence
  VL CDR2
DAS

SEQ ID NO: 2811 - protein, 3 aa, Artificial sequence
  VL CDR2
DAS

SEQ ID NO: 2812 - protein, 3 aa, Artificial sequence
  VL CDR2
DAS

SEQ ID NO: 2813 - protein, 3 aa, Artificial sequence
  VL CDR2
AAS

SEQ ID NO: 2814 - protein, 3 aa, Artificial sequence
  VL CDR2
AAS

SEQ ID NO: 2815 - protein, 3 aa, Artificial sequence
  VL CDR2
GNS

SEQ ID NO: 2816 - protein, 3 aa, Artificial sequence
  VL CDR2
DAS

SEQ ID NO: 2817 - protein, 3 aa, Artificial sequence
  VL CDR2
DAS

SEQ ID NO: 2818 - protein, 3 aa, Artificial sequence
  VL CDR2
DVS

SEQ ID NO: 2819 - protein, 3 aa, Artificial sequence
  VL CDR2
VKN

SEQ ID NO: 2820 - protein, 3 aa, Artificial sequence
  VL CDR2
DVS

SEQ ID NO: 2821 - protein, 3 aa, Artificial sequence
  VL CDR2
EVS

SEQ ID NO: 2822 - protein, 3 aa, Artificial sequence
  VL CDR2
GAS

SEQ ID NO: 2823 - protein, 3 aa, Artificial sequence
  VL CDR2
AAS

SEQ ID NO: 2824 - protein, 3 aa, Artificial sequence
  VL CDR2
GAS

SEQ ID NO: 2825 - protein, 3 aa, Artificial sequence
  VL CDR2
AAS

SEQ ID NO: 2826 - protein, 3 aa, Artificial sequence
  VL CDR2
QDS

SEQ ID NO: 2827 - protein, 3 aa, Artificial sequence
  VL CDR2
DVY

SEQ ID NO: 2828 - protein, 3 aa, Artificial sequence
  VL CDR2
AAS

SEQ ID NO: 2829 - protein, 3 aa, Artificial sequence
  VL CDR2
GAS

SEQ ID NO: 2830 - protein, 3 aa, Artificial sequence
  VL CDR2
DAS

SEQ ID NO: 2831 - protein, 3 aa, Artificial sequence
  VL CDR2
DAS

SEQ ID NO: 2832 - protein, 3 aa, Artificial sequence
  VL CDR2
EVS

SEQ ID NO: 2833 - protein, 3 aa, Artificial sequence
  VL CDR2
AAS

SEQ ID NO: 2834 - protein, 3 aa, Artificial sequence
  VL CDR2
DVS

SEQ ID NO: 2835 - protein, 3 aa, Artificial sequence
  VL CDR2
AAS

SEQ ID NO: 2836 - protein, 3 aa, Artificial sequence
  VL CDR2
LGS

SEQ ID NO: 2837 - protein, 3 aa, Artificial sequence
  VL CDR2
LGS

SEQ ID NO: 2838 - protein, 3 aa, Artificial sequence
  VL CDR2
KAS

SEQ ID NO: 2839 - protein, 3 aa, Artificial sequence
  VL CDR2
QDV

SEQ ID NO: 2840 - protein, 3 aa, Artificial sequence
  VL CDR2
GNS

SEQ ID NO: 2841 - protein, 3 aa, Artificial sequence
  VL CDR2
DDT

SEQ ID NO: 2842 - protein, 3 aa, Artificial sequence
  VL CDR2
LAS

SEQ ID NO: 2843 - protein, 3 aa, Artificial sequence
  VL CDR2
YDS

SEQ ID NO: 2844 - protein, 3 aa, Artificial sequence
  VL CDR2
RNN

SEQ ID NO: 2845 - protein, 3 aa, Artificial sequence
  VL CDR2
GAS

SEQ ID NO: 2846 - protein, 3 aa, Artificial sequence
  VL CDR2
KAS

SEQ ID NO: 2847 - protein, 3 aa, Artificial sequence
  VL CDR2
KAS

SEQ ID NO: 2848 - protein, 3 aa, Artificial sequence
  VL CDR2
GNS

SEQ ID NO: 2849 - protein, 3 aa, Artificial sequence
  VL CDR2
KDS

SEQ ID NO: 2850 - protein, 3 aa, Artificial sequence
  VL CDR2
GAS

SEQ ID NO: 2851 - protein, 3 aa, Artificial sequence
  VL CDR2
DVD

SEQ ID NO: 2852 - protein, 3 aa, Artificial sequence
  VL CDR2
AAS

SEQ ID NO: 2853 - protein, 3 aa, Artificial sequence
  VL CDR2
DDS

SEQ ID NO: 2854 - protein, 3 aa, Artificial sequence
  VL CDR2
AAS

SEQ ID NO: 2855 - protein, 3 aa, Artificial sequence
  VL CDR2
KAS

SEQ ID NO: 2856 - protein, 3 aa, Artificial sequence
  VL CDR2
DDN

SEQ ID NO: 2857 - protein, 3 aa, Artificial sequence
  VL CDR2
DNN

SEQ ID NO: 2858 - protein, 7 aa, Artificial sequence
  VL CDR2
LNSDGSH

SEQ ID NO: 2859 - protein, 3 aa, Artificial sequence
  VL CDR2
DAS

SEQ ID NO: 2860 - protein, 3 aa, Artificial sequence
  VL CDR2
DDS

SEQ ID NO: 2861 - protein, 3 aa, Artificial sequence
  VL CDR2
DAS

SEQ ID NO: 2862 - protein, 3 aa, Artificial sequence
  VL CDR2
DAS

SEQ ID NO: 2863 - protein, 3 aa, Artificial sequence
  VL CDR2
GAS

SEQ ID NO: 2864 - protein, 3 aa, Artificial sequence
  VL CDR2
GAS

SEQ ID NO: 2865 - protein, 3 aa, Artificial sequence
  VL CDR2
STS

SEQ ID NO: 2866 - protein, 3 aa, Artificial sequence
  VL CDR2
AAS

SEQ ID NO: 2867 - protein, 3 aa, Artificial sequence
  VL CDR2
DAS

SEQ ID NO: 2868 - protein, 3 aa, Artificial sequence
  VL CDR2
EVS

SEQ ID NO: 2869 - protein, 3 aa, Artificial sequence
  VL CDR2
EDN

SEQ ID NO: 2870 - protein, 3 aa, Artificial sequence
  VL CDR2
DAS

SEQ ID NO: 2871 - protein, 3 aa, Artificial sequence
  VL CDR2
DNN

SEQ ID NO: 2872 - protein, 3 aa, Artificial sequence
  VL CDR2
NVS

SEQ ID NO: 2873 - protein, 3 aa, Artificial sequence
  VL CDR2
EGY

SEQ ID NO: 2874 - protein, 3 aa, Artificial sequence
  VL CDR2
GAS

SEQ ID NO: 2875 - protein, 3 aa, Artificial sequence
  VL CDR2
DNN

SEQ ID NO: 2876 - protein, 3 aa, Artificial sequence
  VL CDR2
GAS

SEQ ID NO: 2877 - protein, 3 aa, Artificial sequence
  VL CDR2
DAS

SEQ ID NO: 2878 - protein, 3 aa, Artificial sequence
  VL CDR2
GAS

SEQ ID NO: 2879 - protein, 3 aa, Artificial sequence
  VL CDR2
SAS

SEQ ID NO: 2880 - protein, 3 aa, Artificial sequence
  VL CDR2
EVS

SEQ ID NO: 2881 - protein, 3 aa, Artificial sequence
  VL CDR2
TAS

SEQ ID NO: 2882 - protein, 3 aa, Artificial sequence
  VL CDR2
AAS

SEQ ID NO: 2883 - protein, 3 aa, Artificial sequence
  VL CDR2
DAS

SEQ ID NO: 2884 - protein, 3 aa, Artificial sequence
  VL CDR2
VNT

SEQ ID NO: 2885 - protein, 3 aa, Artificial sequence
  VL CDR2
KAS

SEQ ID NO: 2886 - protein, 3 aa, Artificial sequence
  VL CDR2
SVS

SEQ ID NO: 2887 - protein, 3 aa, Artificial sequence
  VL CDR2
SNN

SEQ ID NO: 2888 - protein, 3 aa, Artificial sequence
  VL CDR2
EVS

SEQ ID NO: 2889 - protein, 3 aa, Artificial sequence
  VL CDR2
AAS

SEQ ID NO: 2890 - protein, 3 aa, Artificial sequence
  VL CDR2
DAS

SEQ ID NO: 2891 - protein, 3 aa, Artificial sequence
  VL CDR2
AAS

SEQ ID NO: 2892 - protein, 3 aa, Artificial sequence
  VL CDR2
AAS

SEQ ID NO: 2893 - protein, 3 aa, Artificial sequence
  VL CDR2
DAS

SEQ ID NO: 2894 - protein, 3 aa, Artificial sequence
  VL CDR2
AAS

SEQ ID NO: 2895 - protein, 3 aa, Artificial sequence
  VL CDR2
AAS

SEQ ID NO: 2896 - protein, 3 aa, Artificial sequence
  VL CDR2
GAS

SEQ ID NO: 2897 - protein, 3 aa, Artificial sequence
  VL CDR2
AAS

SEQ ID NO: 2898 - protein, 3 aa, Artificial sequence
  VL CDR2
AAS

SEQ ID NO: 2899 - protein, 3 aa, Artificial sequence
  VL CDR2
AAS

SEQ ID NO: 2900 - protein, 3 aa, Artificial sequence
  VL CDR2
DAS

SEQ ID NO: 2901 - protein, 8 aa, Artificial sequence
  VH CDR1
GLTVSSNY

SEQ ID NO: 2902 - protein, 8 aa, Artificial sequence
  VH CDR1
GFTVSRNY

SEQ ID NO: 2903 - protein, 8 aa, Artificial sequence
  VH CDR1
GVIVSSNY

SEQ ID NO: 2904 - protein, 8 aa, Artificial sequence
  VH CDR1
GFTVSSNY

SEQ ID NO: 2905 - protein, 8 aa, Artificial sequence
  VH CDR1
GVTVSSNY

SEQ ID NO: 2906 - protein, 8 aa, Artificial sequence
  VH CDR1
GIIVSSNY

SEQ ID NO: 2907 - protein, 8 aa, Artificial sequence
  VH CDR1
GIIVSSNY

SEQ ID NO: 2908 - protein, 8 aa, Artificial sequence
  VH CDR1
GFTVSSNY

SEQ ID NO: 2909 - protein, 8 aa, Artificial sequence
  VH CDR1
GLTVSSNY

SEQ ID NO: 2910 - protein, 8 aa, Artificial sequence
  VH CDR1
GLTVSSNY

SEQ ID NO: 2911 - protein, 8 aa, Artificial sequence
  VH CDR1
GIIVSSNY

SEQ ID NO: 2912 - protein, 8 aa, Artificial sequence
  VH CDR1
GVTVSRNY

SEQ ID NO: 2913 - protein, 8 aa, Artificial sequence
  VH CDR1
GITVSSNY

SEQ ID NO: 2914 - protein, 8 aa, Artificial sequence
  VH CDR1
GFTVSSNY

SEQ ID NO: 2915 - protein, 8 aa, Artificial sequence
  VH CDR1
GLTVSSNY

SEQ ID NO: 2916 - protein, 8 aa, Artificial sequence
  VH CDR1
GLTVSSNY

SEQ ID NO: 2917 - protein, 8 aa, Artificial sequence
  VH CDR1
GLIVSSNY

SEQ ID NO: 2918 - protein, 8 aa, Artificial sequence
  VH CDR1
GFTVSSNY

SEQ ID NO: 2919 - protein, 8 aa, Artificial sequence
  VH CDR1
GFIVSSNY

SEQ ID NO: 2920 - protein, 8 aa, Artificial sequence
  VH CDR1
GFTVSSNY

SEQ ID NO: 2921 - protein, 8 aa, Artificial sequence
  VH CDR1
GFIVSRNY

SEQ ID NO: 2922 - protein, 8 aa, Artificial sequence
  VH CDR1
GITVSSNY

SEQ ID NO: 2923 - protein, 8 aa, Artificial sequence
  VH CDR1
GFTVSSNY

SEQ ID NO: 2924 - protein, 8 aa, Artificial sequence
  VH CDR1
GFTVSSNY

SEQ ID NO: 2925 - protein, 8 aa, Artificial sequence
  VH CDR1
GFTVSSNY

SEQ ID NO: 2926 - protein, 8 aa, Artificial sequence
  VH CDR1
GVTVSSNY

SEQ ID NO: 2927 - protein, 8 aa, Artificial sequence
  VH CDR1
GFTVSSNY

SEQ ID NO: 2928 - protein, 8 aa, Artificial sequence
  VH CDR1
GYTFSSYG

SEQ ID NO: 2929 - protein, 8 aa, Artificial sequence
  VH CDR1
GYSFTYYG

SEQ ID NO: 2930 - protein, 8 aa, Artificial sequence
  VH CDR1
GFTFSSYD

SEQ ID NO: 2931 - protein, 8 aa, Artificial sequence
  VH CDR1
GFIVSSNY

SEQ ID NO: 2932 - protein, 8 aa, Artificial sequence
  VH CDR1
EFIVSRNY

SEQ ID NO: 2933 - protein, 8 aa, Artificial sequence
  VH CDR1
GFTVSSNY

SEQ ID NO: 2934 - protein, 8 aa, Artificial sequence
  VH CDR1
GFTVSSNY

SEQ ID NO: 2935 - protein, 8 aa, Artificial sequence
  VH CDR1
GFTVSFNY

SEQ ID NO: 2936 - protein, 7 aa, Artificial sequence
  VH CDR2
IYSGGST

SEQ ID NO: 2937 - protein, 7 aa, Artificial sequence
  VH CDR2
IYSGGTT

SEQ ID NO: 2938 - protein, 7 aa, Artificial sequence
  VH CDR2
IYSGGTT

SEQ ID NO: 2939 - protein, 7 aa, Artificial sequence
  VH CDR2
IYSGGST

SEQ ID NO: 2940 - protein, 7 aa, Artificial sequence
  VH CDR2
IYSGGST

SEQ ID NO: 2941 - protein, 7 aa, Artificial sequence
  VH CDR2
IYSGGST

SEQ ID NO: 2942 - protein, 7 aa, Artificial sequence
  VH CDR2
IYSGGST

SEQ ID NO: 2943 - protein, 7 aa, Artificial sequence
  VH CDR2
IYSGGST

SEQ ID NO: 2944 - protein, 7 aa, Artificial sequence
  VH CDR2
IYSGGST

SEQ ID NO: 2945 - protein, 7 aa, Artificial sequence
  VH CDR2
IYSGGST

SEQ ID NO: 2946 - protein, 7 aa, Artificial sequence
  VH CDR2
IYSGGST

SEQ ID NO: 2947 - protein, 7 aa, Artificial sequence
  VH CDR2
IYSGGST

SEQ ID NO: 2948 - protein, 7 aa, Artificial sequence
  VH CDR2
IYSGGST

SEQ ID NO: 2949 - protein, 7 aa, Artificial sequence
  VH CDR2
IYSGGST

SEQ ID NO: 2950 - protein, 7 aa, Artificial sequence
  VH CDR2
IYSGGST

SEQ ID NO: 2951 - protein, 7 aa, Artificial sequence
  VH CDR2
IYSGGST

SEQ ID NO: 2952 - protein, 7 aa, Artificial sequence
  VH CDR2
IYSGGST

SEQ ID NO: 2953 - protein, 7 aa, Artificial sequence
  VH CDR2
IYRGGST

SEQ ID NO: 2954 - protein, 7 aa, Artificial sequence
  VH CDR2
IYSGGST

SEQ ID NO: 2955 - protein, 7 aa, Artificial sequence
  VH CDR2
IYPGGST

SEQ ID NO: 2956 - protein, 7 aa, Artificial sequence
  VH CDR2
IYSGGST

SEQ ID NO: 2957 - protein, 7 aa, Artificial sequence
  VH CDR2
IYSGGST

SEQ ID NO: 2958 - protein, 7 aa, Artificial sequence
  VH CDR2
IYSGGST

SEQ ID NO: 2959 - protein, 7 aa, Artificial sequence
  VH CDR2
IYSGGST

SEQ ID NO: 2960 - protein, 7 aa, Artificial sequence
  VH CDR2
IYSGGST

SEQ ID NO: 2961 - protein, 7 aa, Artificial sequence
  VH CDR2
VYSGGST

SEQ ID NO: 2962 - protein, 7 aa, Artificial sequence
  VH CDR2
IYSGGST

SEQ ID NO: 2963 - protein, 8 aa, Artificial sequence
  VH CDR2
ISGYNGHT

SEQ ID NO: 2964 - protein, 8 aa, Artificial sequence
  VH CDR2
ISPYNGDT

SEQ ID NO: 2965 - protein, 7 aa, Artificial sequence
  VH CDR2
IGTAGDT

SEQ ID NO: 2966 - protein, 7 aa, Artificial sequence
  VH CDR2
IYSGGST

SEQ ID NO: 2967 - protein, 7 aa, Artificial sequence
  VH CDR2
IYSGGST

SEQ ID NO: 2968 - protein, 7 aa, Artificial sequence
  VH CDR2
IYSGGST

SEQ ID NO: 2969 - protein, 7 aa, Artificial sequence
  VH CDR2
IYSGGST

SEQ ID NO: 2970 - protein, 7 aa, Artificial sequence
  VH CDR2
IYPGGST

SEQ ID NO: 2971 - protein, 11 aa, Artificial sequence
  VH CDR3
ARDLDYYGMDV

SEQ ID NO: 2972 - protein, 11 aa, Artificial sequence
  VH CDR3
ARDLVVYGMDV

SEQ ID NO: 2973 - protein, 11 aa, Artificial sequence
  VH CDR3
ARDLDYYGMDV

SEQ ID NO: 2974 - protein, 12 aa, Artificial sequence
  VH CDR3
ARDLDYGGGMDV

SEQ ID NO: 2975 - protein, 13 aa, Artificial sequence
  VH CDR3
ARPIVGARSGMDV

SEQ ID NO: 2976 - protein, 11 aa, Artificial sequence
  VH CDR3
ARDLGTYGMDV

SEQ ID NO: 2977 - protein, 11 aa, Artificial sequence
  VH CDR3
ARDLGPYGMDV

SEQ ID NO: 2978 - protein, 11 aa, Artificial sequence
  VH CDR3
ARDLGAYGMDV

SEQ ID NO: 2979 - protein, 11 aa, Artificial sequence
  VH CDR3
ARDLYYYGMDV

SEQ ID NO: 2980 - protein, 11 aa, Artificial sequence
  VH CDR3
ARDLDYYGMDV

SEQ ID NO: 2981 - protein, 11 aa, Artificial sequence
  VH CDR3
ARDLDYYGMDV

SEQ ID NO: 2982 - protein, 9 aa, Artificial sequence
  VH CDR3
ARDGYGMDV

SEQ ID NO: 2983 - protein, 12 aa, Artificial sequence
  VH CDR3
ARGGAYYYGMDV

SEQ ID NO: 2984 - protein, 9 aa, Artificial sequence
  VH CDR3
ARDLDYMDV

SEQ ID NO: 2985 - protein, 9 aa, Artificial sequence
  VH CDR3
ARLPYGMDV

SEQ ID NO: 2986 - protein, 9 aa, Artificial sequence
  VH CDR3
ARLPYGMDV

SEQ ID NO: 2987 - protein, 12 aa, Artificial sequence
  VH CDR3
ARARIYTYGPDY

SEQ ID NO: 2988 - protein, 13 aa, Artificial sequence
  VH CDR3
ARVGDSRSWPFEY

SEQ ID NO: 2989 - protein, 11 aa, Artificial sequence
  VH CDR3
ARAPYSSRSET

SEQ ID NO: 2990 - protein, 12 aa, Artificial sequence
  VH CDR3
AREIRVITPVEV

SEQ ID NO: 2991 - protein, 10 aa, Artificial sequence
  VH CDR3
ARGPYPRFDY

SEQ ID NO: 2992 - protein, 10 aa, Artificial sequence
  VH CDR3
ARERGGRFDY

SEQ ID NO: 2993 - protein, 11 aa, Artificial sequence
  VH CDR3
ARDRPAAAIRF

SEQ ID NO: 2994 - protein, 8 aa, Artificial sequence
  VH CDR3
ARDYAGRV

SEQ ID NO: 2995 - protein, 16 aa, Artificial sequence
  VH CDR3
ARELSYSSSSGVGPKY

SEQ ID NO: 2996 - protein, 19 aa, Artificial sequence
  VH CDR3
ARLINHYYDSSGDGGAFDI

SEQ ID NO: 2997 - protein, 18 aa, Artificial sequence
  VH CDR3
ARIGGVAAAGTADGAFDI

SEQ ID NO: 2998 - protein, 11 aa, Artificial sequence
  VH CDR3
ARERFGISHDY

SEQ ID NO: 2999 - protein, 16 aa, Artificial sequence
  VH CDR3
AKGVVALTGTLLRLDP

SEQ ID NO: 3000 - protein, 18 aa, Artificial sequence
  VH CDR3
ARDRDNGSGSYLGWAFDI

SEQ ID NO: 3001 - protein, 11 aa, Artificial sequence
  VH CDR3
ARDYGDYYFDY

SEQ ID NO: 3002 - protein, 11 aa, Artificial sequence
  VH CDR3
ARDYGDYYFDY

SEQ ID NO: 3003 - protein, 11 aa, Artificial sequence
  VH CDR3
ARDYGDYWFDP

SEQ ID NO: 3004 - protein, 11 aa, Artificial sequence
  VH CDR3
ARSYGDYYFDY

SEQ ID NO: 3005 - protein, 11 aa, Artificial sequence
  VH CDR3
ARDYGDFYFDY

SEQ ID NO: 3006 - protein, 6 aa, Artificial sequence
  VL CDR1
QGISSY

SEQ ID NO: 3007 - protein, 6 aa, Artificial sequence
  VL CDR1
QGISSY

SEQ ID NO: 3008 - protein, 6 aa, Artificial sequence
  VL CDR1
QGISSY

SEQ ID NO: 3009 - protein, 6 aa, Artificial sequence
  VL CDR1
QGISSY

SEQ ID NO: 3010 - protein, 6 aa, Artificial sequence
  VL CDR1
QDINNY

SEQ ID NO: 3011 - protein, 6 aa, Artificial sequence
  VL CDR1
QGISSY

SEQ ID NO: 3012 - protein, 6 aa, Artificial sequence
  VL CDR1
QGISSD

SEQ ID NO: 3013 - protein, 6 aa, Artificial sequence
  VL CDR1
QGISSY

SEQ ID NO: 3014 - protein, 6 aa, Artificial sequence
  VL CDR1
QGISSY

SEQ ID NO: 3015 - protein, 6 aa, Artificial sequence
  VL CDR1
QGISSY

SEQ ID NO: 3016 - protein, 6 aa, Artificial sequence
  VL CDR1
QGISSY

SEQ ID NO: 3017 - protein, 6 aa, Artificial sequence
  VL CDR1
QGISSY

SEQ ID NO: 3018 - protein, 6 aa, Artificial sequence
  VL CDR1
QGISSY

SEQ ID NO: 3019 - protein, 6 aa, Artificial sequence
  VL CDR1
QGISSY

SEQ ID NO: 3020 - protein, 6 aa, Artificial sequence
  VL CDR1
QDVSKY

SEQ ID NO: 3021 - protein, 6 aa, Artificial sequence
  VL CDR1
QDIRNY

SEQ ID NO: 3022 - protein, 6 aa, Artificial sequence
  VL CDR1
QDINNY

SEQ ID NO: 3023 - protein, 6 aa, Artificial sequence
  VL CDR1
QDISNY

SEQ ID NO: 3024 - protein, 6 aa, Artificial sequence
  VL CDR1
QDIRNY

SEQ ID NO: 3025 - protein, 6 aa, Artificial sequence
  VL CDR1
QDINKY

SEQ ID NO: 3026 - protein, 6 aa, Artificial sequence
  VL CDR1
QDIRNY

SEQ ID NO: 3027 - protein, 6 aa, Artificial sequence
  VL CDR1
QDISNY

SEQ ID NO: 3028 - protein, 6 aa, Artificial sequence
  VL CDR1
QDISNY

SEQ ID NO: 3029 - protein, 6 aa, Artificial sequence
  VL CDR1
QDIRSY

SEQ ID NO: 3030 - protein, 6 aa, Artificial sequence
  VL CDR1
QDISNY

SEQ ID NO: 3031 - protein, 9 aa, Artificial sequence
  VL CDR1
SSDVGSYNL

SEQ ID NO: 3032 - protein, 9 aa, Artificial sequence
  VL CDR1
SSDVGSYNL

SEQ ID NO: 3033 - protein, 6 aa, Artificial sequence
  VL CDR1
QSVGSN

SEQ ID NO: 3034 - protein, 6 aa, Artificial sequence
  VL CDR1
QSVRTN

SEQ ID NO: 3035 - protein, 6 aa, Artificial sequence
  VL CDR1
QSISSY

SEQ ID NO: 3036 - protein, 7 aa, Artificial sequence
  VL CDR1
QSVSSSY

SEQ ID NO: 3037 - protein, 6 aa, Artificial sequence
  VL CDR1
QGVSSF

SEQ ID NO: 3038 - protein, 7 aa, Artificial sequence
  VL CDR1
QSVSSSY

SEQ ID NO: 3039 - protein, 6 aa, Artificial sequence
  VL CDR1
QGISSY

SEQ ID NO: 3040 - protein, 7 aa, Artificial sequence
  VL CDR1
QSVSSSY

SEQ ID NO: 3041 - protein, 3 aa, Artificial sequence
  VL CDR2
AAS

SEQ ID NO: 3042 - protein, 3 aa, Artificial sequence
  VL CDR2
AAS

SEQ ID NO: 3043 - protein, 3 aa, Artificial sequence
  VL CDR2
AAS

SEQ ID NO: 3044 - protein, 3 aa, Artificial sequence
  VL CDR2
AAS

SEQ ID NO: 3045 - protein, 3 aa, Artificial sequence
  VL CDR2
DAS

SEQ ID NO: 3046 - protein, 3 aa, Artificial sequence
  VL CDR2
AAS

SEQ ID NO: 3047 - protein, 3 aa, Artificial sequence
  VL CDR2
AAS

SEQ ID NO: 3048 - protein, 3 aa, Artificial sequence
  VL CDR2
AAS

SEQ ID NO: 3049 - protein, 3 aa, Artificial sequence
  VL CDR2
AAS

SEQ ID NO: 3050 - protein, 3 aa, Artificial sequence
  VL CDR2
AAS

SEQ ID NO: 3051 - protein, 3 aa, Artificial sequence
  VL CDR2
AAS

SEQ ID NO: 3052 - protein, 3 aa, Artificial sequence
  VL CDR2
AAS

SEQ ID NO: 3053 - protein, 3 aa, Artificial sequence
  VL CDR2
AAS

SEQ ID NO: 3054 - protein, 3 aa, Artificial sequence
  VL CDR2
AAS

SEQ ID NO: 3055 - protein, 3 aa, Artificial sequence
  VL CDR2
DAS

SEQ ID NO: 3056 - protein, 3 aa, Artificial sequence
  VL CDR2
DAS

SEQ ID NO: 3057 - protein, 3 aa, Artificial sequence
  VL CDR2
DAS

SEQ ID NO: 3058 - protein, 3 aa, Artificial sequence
  VL CDR2
DAS

SEQ ID NO: 3059 - protein, 3 aa, Artificial sequence
  VL CDR2
DAS

SEQ ID NO: 3060 - protein, 3 aa, Artificial sequence
  VL CDR2
DAS

SEQ ID NO: 3061 - protein, 3 aa, Artificial sequence
  VL CDR2
DAS

SEQ ID NO: 3062 - protein, 3 aa, Artificial sequence
  VL CDR2
DAS

SEQ ID NO: 3063 - protein, 3 aa, Artificial sequence
  VL CDR2
DAS

SEQ ID NO: 3064 - protein, 3 aa, Artificial sequence
  VL CDR2
DAS

SEQ ID NO: 3065 - protein, 3 aa, Artificial sequence
  VL CDR2
DAS

SEQ ID NO: 3066 - protein, 3 aa, Artificial sequence
  VL CDR2
EVT

SEQ ID NO: 3067 - protein, 3 aa, Artificial sequence
  VL CDR2
EGS

SEQ ID NO: 3068 - protein, 3 aa, Artificial sequence
  VL CDR2
GAF

SEQ ID NO: 3069 - protein, 3 aa, Artificial sequence
  VL CDR2
EAS

SEQ ID NO: 3070 - protein, 3 aa, Artificial sequence
  VL CDR2
AAS

SEQ ID NO: 3071 - protein, 3 aa, Artificial sequence
  VL CDR2
GAS

SEQ ID NO: 3072 - protein, 3 aa, Artificial sequence
  VL CDR2
GAS

SEQ ID NO: 3073 - protein, 3 aa, Artificial sequence
  VL CDR2
GTS

SEQ ID NO: 3074 - protein, 3 aa, Artificial sequence
  VL CDR2
AAS

SEQ ID NO: 3075 - protein, 3 aa, Artificial sequence
  VL CDR2
GAS

SEQ ID NO: 3076 - protein, 10 aa, Artificial sequence
  VL CDR3
QHLNSYPPIT

SEQ ID NO: 3077 - protein, 9 aa, Artificial sequence
  VL CDR3
QQLNSYPLT

SEQ ID NO: 3078 - protein, 9 aa, Artificial sequence
  VL CDR3
QQLNSYGLT

SEQ ID NO: 3079 - protein, 11 aa, Artificial sequence
  VL CDR3
QQLNSYPHRFT

SEQ ID NO: 3080 - protein, 9 aa, Artificial sequence
  VL CDR3
QQHDNLPVT

SEQ ID NO: 3081 - protein, 9 aa, Artificial sequence
  VL CDR3
QQLNSYLYT

SEQ ID NO: 3082 - protein, 9 aa, Artificial sequence
  VL CDR3
QQLNSDLYT

SEQ ID NO: 3083 - protein, 9 aa, Artificial sequence
  VL CDR3
QQLNSDLYT

SEQ ID NO: 3084 - protein, 8 aa, Artificial sequence
  VL CDR3
QQLDSYPL

SEQ ID NO: 3085 - protein, 10 aa, Artificial sequence
  VL CDR3
QQLNSYLAIT

SEQ ID NO: 3086 - protein, 10 aa, Artificial sequence
  VL CDR3
QQLNSYPPFT

SEQ ID NO: 3087 - protein, 9 aa, Artificial sequence
  VL CDR3
QQLNSYPPA

SEQ ID NO: 3088 - protein, 10 aa, Artificial sequence
  VL CDR3
QQLNTYPPFG

SEQ ID NO: 3089 - protein, 11 aa, Artificial sequence
  VL CDR3
QQLNSYPPMYT

SEQ ID NO: 3090 - protein, 9 aa, Artificial sequence
  VL CDR3
QQYDNLPVT

SEQ ID NO: 3091 - protein, 9 aa, Artificial sequence
  VL CDR3
QQYDNLPIT

SEQ ID NO: 3092 - protein, 9 aa, Artificial sequence
  VL CDR3
QQYDNLPPV

SEQ ID NO: 3093 - protein, 10 aa, Artificial sequence
  VL CDR3
QQYDNLPLFT

SEQ ID NO: 3094 - protein, 9 aa, Artificial sequence
  VL CDR3
QQYDNLPIT

SEQ ID NO: 3095 - protein, 9 aa, Artificial sequence
  VL CDR3
HQYDNLPRT

SEQ ID NO: 3096 - protein, 9 aa, Artificial sequence
  VL CDR3
QQYDNLPVT

SEQ ID NO: 3097 - protein, 10 aa, Artificial sequence
  VL CDR3
QQHDNLPSFT

SEQ ID NO: 3098 - protein, 9 aa, Artificial sequence
  VL CDR3
QQYDNLPPA

SEQ ID NO: 3099 - protein, 9 aa, Artificial sequence
  VL CDR3
QQYDNLPQT

SEQ ID NO: 3100 - protein, 9 aa, Artificial sequence
  VL CDR3
QQYDNLPPT

SEQ ID NO: 3101 - protein, 10 aa, Artificial sequence
  VL CDR3
CSYAGSSTWV

SEQ ID NO: 3102 - protein, 10 aa, Artificial sequence
  VL CDR3
CSYAGSSTWV

SEQ ID NO: 3103 - protein, 8 aa, Artificial sequence
  VL CDR3
QQYNNWYT

SEQ ID NO: 3104 - protein, 10 aa, Artificial sequence
  VL CDR3
QQYNNWPPIT

SEQ ID NO: 3105 - protein, 10 aa, Artificial sequence
  VL CDR3
QQSYSMPPVT

SEQ ID NO: 3106 - protein, 9 aa, Artificial sequence
  VL CDR3
QQYGSTPRT

SEQ ID NO: 3107 - protein, 9 aa, Artificial sequence
  VL CDR3
QQYGSSPRT

SEQ ID NO: 3108 - protein, 9 aa, Artificial sequence
  VL CDR3
QQYGSSPRT

SEQ ID NO: 3109 - protein, 5 aa, Artificial sequence
  VL CDR3
QQLNS

SEQ ID NO: 3110 - protein, 9 aa, Artificial sequence
  VL CDR3
QQYDSSPRT

SEQ ID NO: 3111 - protein, 117 aa, Artificial sequence
  VH
EVQLVESGGGLIQPGGSLRLSCAASGLTVSSNYMSWVRQAPGKGLEWVSVIYSGGSTYYADSVKGRFTISRDNSTNTLYLQMNSLRAEDTAVYYCARDLDYYGMDVWGQGTTVTVSS

SEQ ID NO: 3112 - protein, 117 aa, Artificial sequence; identical to SEQ ID NO: 1071
  VH

SEQ ID NO: 3113 - protein, 117 aa, Artificial sequence
  VH
EVQLVESGGGLVQPGGSLRLSCAASGVIVSSNYMRWVRQAPGKGLEWVSVIYSGGTTYYADSVKGRFTISRHNSKNTLYLQMNSLRTEDTAVYYCARDLDYYGMDVWGQGTTVTVSS

SEQ ID NO: 3114 - protein, 118 aa, Artificial sequence
  VH
EVQLVESGGGLVQPGGSLRLSCAASGFTVSSNYMSWVRQAPGKGLEWVSVIYSGGSTYYADSVKGRFTISRHNSKNTLYLQMNSLRAEDTAVYYCARDLDYGGGMDVWGQGTTVTVSS

SEQ ID NO: 3115 - protein, 119 aa, Artificial sequence
  VH
EVQLVESGGGLIQPGGSLRLSCAASGVTVSSNYMSWVRQAPGKGLEWVSLIYSGGSTYYADSVKGRFTISRDNSKNTLYLQMNSLRAEDTAVYYCARPIVGARSGMDVWGQGTTVTVSS

SEQ ID NO: 3116 - protein, 116 aa, Artificial sequence
  VH
EVQLVESGGGLIQPGGSLRLSCAASGIIVSSNYMSWVRQAPGKGLEWVSVIYSGGSTFYADSVKGRFTISRDNSKNTLYLQMNTMRAEDTAVYYCARDLGTYGMDVWGQGTTVTVS

SEQ ID NO: 3117 - protein, 117 aa, Artificial sequence
  VH
EVQLVESGGGLIQPGGSLRLSCAASGIIVSSNYMTWVRQAPGKGLEWVSVIYSGGSTFYADSVKGRFTISRDNSKNTLYLQMSSLRAEDTAVYYCARDLGPYGMDVWGQGTTVTVSS

SEQ ID NO: 3118 - protein, 117 aa, Artificial sequence
  VH
EVQLVESGGGLIQPGGSLRLSCAASGFTVSSNYMSWVRQAPGKGLEWVSVIYSGGSTFYADSVKGRFTISRDNSKNTLYLQMNSLRAEDTAVYYCARDLGAYGMDVWGQGTTVTVSS

SEQ ID NO: 3119 - protein, 117 aa, Artificial sequence
  VH
EVQLVESGGGLIQPGGSLRLSCAASGLTVSSNYMSWVRQAPGKGLEWVSVIYSGGSTFYADSVKGRFTISRDNSKNTLYLQMNSLRAEDTAVYYCARDLYYYGMDVWGQGTTVTVSS

SEQ ID NO: 3120 - protein, 117 aa, Artificial sequence
  VH
EVQLVESGGGLIQPGGSLRLSCAASGLTVSSNYMSWVRQAPGKGLEWVSVIYSGGSTYYADSVKGRFTISRDNSKNTLYLQMNSLRAEDTAVYYCARDLDYYGMDVWGQGTTVTVSS

SEQ ID NO: 3121 - protein, 117 aa, Artificial sequence
  VH
EVQLVESGGGLVQPGGSLRLSCAASGIIVSSNYMSWVRQAPGKGLEWVSVIYSGGSTYYADSVKGRFTISRDNSKNTLYLQMNSLRAEDTAVYYCARDLDYYGMDVWGQGTTVTVSS

SEQ ID NO: 3122 - protein, 115 aa, Artificial sequence
  VH
EVQLVESGGGLVQPGGSLRLSCAASGVTVSRNYMSWVRQAPGKGLEWVSVIYSGGSTDYADSVKGRFTISRHNSKNTLYLQMNSLRVEDTAVYYCARDGYGMDVWGQGTTVTVSS

SEQ ID NO: 3123 - protein, 118 aa, Artificial sequence
  VH
EVQLVESGGGLIQPGGSLRLSCAASGITVSSNYMSWVRQAPGKGLEWVSVIYSGGSTYYADSVKGRFTISRDNSKNTLYLQMNSLRAEDTAVYYCARGGAYYYGMDVWGQGTTVTVSS

SEQ ID NO: 3124 - protein, 115 aa, Artificial sequence
  VH
EVQLVESGGGLVQPGGSLRLSCAASGFTVSSNYMSWVRQAPGKGLEWVSVIYSGGSTYYADSVKGRFTISRDNSKNTLYLQMNSLRAEDTAVYYCARDLDYMDVWGKGTTVTVSS

SEQ ID NO: 3125 - protein, 115 aa, Artificial sequence
  VH
EVQLVESGGGLVQPGGSLRLSCAASGLTVSSNYMSWVRQAPGKGLEWVSVIYSGGSTFYADSVKGRFTISRDNSKNTLYLQMNSVRAEDTAVYYCARLPYGMDVWGQGTTVTVSS

SEQ ID NO: 3126 - protein, 115 aa, Artificial sequence
  VH
EVQLVESGGGLVQPGGSLRLSCAASGLTVSSNYMSWVRQAPGKGLNWVSVIYSGGSTYYADSVKGRFTISRDNSKNTLYLEMNSLKPEDTAVYYCARLPYGMDVWGQGTTVTVSS

SEQ ID NO: 3127 - protein, 118 aa, Artificial sequence
  VH
QVQLVESGGGLVQPGGSLRLSCAASGLIVSSNYMSWVRQAPGEGLEWVSVIYSGGSTYYADSVKGRFTISRDTSKNTLYLQMNSLRAEDTAVYYCARARIYTYGPDYWGQGTLVTVSS

SEQ ID NO: 3128 - protein, 119 aa, Artificial sequence
  VH
EVQLVESGGGLVQPGGSLRLSCAASGFTVSSNYMSWVRQAPGRGLEWVSVIYRGGSTYYADSVKGRFSISRDNSKNTLYLQMNSLRVEDTAVYYCARVGDSRSWPFEYWGQGTLVTVSS

SEQ ID NO: 3129 - protein, 119 aa, Artificial sequence
  VH
EVQLVESGGGLVQPGGSLRLSCAASGFIVSSNYMSWVRQAPGKGLEWVSVIYSGGSTYYADSVKGRFTISRDNSKNTLYLRMNSLRAEDTAVYYCARAPYCSSRSCETWGQGTLVTVSS

SEQ ID NO: 3130 - protein, 118 aa, Artificial sequence
  VH
EVQLVESGGGLVQPGGSLRLSCAASGFTVSSNYMSWVRQAPGKGLEWVSLIYPGGSTYYADSVEGRFTISRDNSKNTLYLQMNSLRAEDTAVYYCAREIRVITPVEVWGQGTLVTVSS

SEQ ID NO: 3131 - protein, 116 aa, Artificial sequence
  VH
EVQLVESGGGLVQPGGSLRLSCAVSGFIVSRNYMTWVRQAPGKGLEWVSLIYSGGSTFYTNSVKGRFTISRDNSKNTLYLQMDSLRAEDTAVYYCARGPYPRFDYWGQGTLVTVSS

SEQ ID NO: 3132 - protein, 116 aa, Artificial sequence
  VH
EVQLVESGGGLIQPGGSLRLSCAASGITVSSNYMSWVRQAPGKGLEWVSVIYSGGSTFYSDSVKGRFTISRDNSKNTLYLQMNSLRAEDTAVYYCARERGGRFDYWGQGTLVTVSS

SEQ ID NO: 3133 - protein, 116 aa, Artificial sequence
  VH
EVQLVESGGGLVQPGGSLRLSCAASGFTVSSNYMSWVRQAPGKGLEWVSLIYSGGSTYYADSVKGRFTISRDNSKNTLYLQMNSLRAEDTAVYYCARDRPAAAIRFGQGTLVTVSS

SEQ ID NO: 3134 - protein, 114 aa, Artificial sequence
  VH
EVQLVESGGGLVQPGGSLRLSCAASGFTVSSNYMSWVRQAPGKGLEWVSIIYSGGSTYYADSVKGRFTISRDNSKNTLYLQMNSLRAEDTAVYYCARDYAGRVWGQGTLVTVSS

SEQ ID NO: 3135 - protein, 122 aa, Artificial sequence
  VH
EVQLVESGGGLVQPGGSLRLSCAASGFTVSSNYMSWVRQAPGKGLEWVSVIYSGGSTYYADSVKGRFTISRDNSKNTLYLQMNSLRAEDTAVYYCARELSYSSSSGVGPKYWGQGTLVTVSS

SEQ ID NO: 3136 - protein, 125 aa, Artificial sequence
  VH
EVQLVESGGGLVQPGGSLRLSCAASGVTVSSNYMSWVRQAPGKGLEWVSAVYSGGSTYYADSVKGRFTISRHNSKNTLYLQMKSLRPEDTAIYYCARLINHYYDSSGDGGAFDIWGQGTMVTVSS

SEQ ID NO: 3137 - protein, 124 aa, Artificial sequence
  VH
EVQLVESGGGLVQPGGSLRLSCAASGFTVSSNYMSWVRQAPGKGLEWVSVIYSGGSTYYADSVKGRFTISRDNSKNTLYLQMNSLRAEDTAVYYCARIGGVAAAGTADGAFDIWGQGTMVTVSS

SEQ ID NO: 3138 - protein, 118 aa, Artificial sequence
  VH
QVQLVQSGAEVKKPGASVKVSCKTSGYTFSSYGLSWVRQAPGQGLEWMGWISGYNGHTVNAQNFQDRVTMTTDTSTDTAYMELRSLRSDDTALYFCARERFGISHDYWGQGTLVIVSS

SEQ ID NO: 3139 - protein, 123 aa, Artificial sequence
  VH
QIQLVQSGPEVKRPGASVKVSCKASGYSFTYYGISWVRQAPGQGLEWMGWISPYNGDTKFAQKFQDRVILTTDTSTSTAYMELKSLRSDDTAVYYCAKGVVALTGTLLRLDPWGQGTLVTVSS

SEQ ID NO: 3140 - protein, 124 aa, Artificial sequence
  VH
EVQLVESGGGLVQPGGSLRLSCAASGFTFSSYDMHWVRQATGKGLEWVSVIGTAGDTYYPGSVKGRFTISRENAKNSLYLQMNSLRAGDTAVYYCARDRDNGSGSYLGWAFDIWGQGTMVTVSS

SEQ ID NO: 3141 - protein, 117 aa, Artificial sequence
  VH
EVQLVESGGGLIQPGGSLRLSCAASGFIVSSNYMSWVRQAPGKGLEWVSVIYSGGSTYYADSVKGRFTISRDNSKNTLYLQMNSLRAEDTAVYYCARDYGDYYFDYWGQGTLVTVSS

SEQ ID NO: 3142 - protein, 117 aa, Artificial sequence
  VH
EVQLVESGGGLIQPGGSLRLSCAASEFIVSRNYMSWVRQAPGKGLEWVSVIYSGGSTYYADSVKGRFTISRDNSKNTLNLQMNSLRAEDTAVYYCARDYGDYYFDYWGQGTLVTVSS

SEQ ID NO: 3143 - protein, 117 aa, Artificial sequence
  VH
EVQLVESGGGLIQPGGSLRLSCAASGFTVSSNYMSWVRQAPGKGLEWVSVIYSGGSTYYADSVKGRFTISRDNSKNTLYLQMNSLRAEDTAVYYCARDYGDYWFDPWGQGTLVTVSS

SEQ ID NO: 3144 - protein, 117 aa, Artificial sequence
  VH
EVQLVESGGGLIQPGGSLRLSCAASGFTVSSNYMSWVRQAPGKGLEWVSVIYSGGSTYYADSVKGRFTISRDNSKNTLYLQMNSLRAEDTAVYYCARSYGDYYFDYWGQGTLVTVSS

SEQ ID NO: 3145 - protein, 117 aa, Artificial sequence
  VH
EVQVVESGGGLVQPGGSLRLSCAASGFTVSFNYMSWVRQAPGKGLEWVSVIYPGGSTYYADSVKGRFTISRHNSKNTVYLQMNSLRAEDTAVYYCARDYGDFYFDYWGQGTLVTVSS

SEQ ID NO: 3146 - protein, 108 aa, Artificial sequence
  VL
DIQLTQSPSSLSASVGDRVTITCRASQGISSYLAWYQQKPGKAPNLLIYAASTLQSGVPSRFSGSGSGTDFTLTISSLQPEDFATYYCQHLNSYPPITFGQGTRLEIK

SEQ ID NO: 3147 - protein, 107 aa, Artificial sequence; identical to SEQ ID NO: 1431
  VL

SEQ ID NO: 3148 - protein, 107 aa, Artificial sequence
  VL
DIQLTQSPSSLSASVGDRVTITCRASQGISSYLAWYQQKPGKAPKLLIYAASTLQRGVPSRFSGSGSGTDFNLTISSLQPEDFGTYYCQQLNSYGLTFGGGTKVEIK

SEQ ID NO: 3149 - protein, 109 aa, Artificial sequence
  VL
DIQLTQSPSFLSASVGDRVTITCRASQGISSYLAWYQQKPGKAPKLLIYAASTLQSGVPSRFSGSGSGTEFTLTISSLQPEDFATYYCQQLNSYPHRFTFGPGTKVDIK

SEQ ID NO: 3150 - protein, 107 aa, Artificial sequence
  VL
DIQMTQSPSSLSASVGDRVTITCQASQDINNYLNWYQQKPGKAPKLLIYDASNLETGVPSRFSGSGSGTDFTFIISSLQPEDIATYYCQQHDNLPVTFGGGTKVEIK

SEQ ID NO: 3151 - protein, 107 aa, Artificial sequence
  VL
DIQLTQSPSFLSASVGDRVTITCRASQGISSYLAWYEQKPGKAPKLLIYAASTLQSGVPSRFSGSGSGTEFTLTISTLQPGDFATYYCQQLNSYLYTFGQGTKLEIK

SEQ ID NO: 3152 - protein, 107 aa, Artificial sequence
  VL
DIQLTQSPSFLSASVGDRVTITCRASQGISSDLAWYQQKPGKAPNLLIYAASTLQSGVPSRFSGSGSGTEFTLTISSLQPEDFATYYCQQLNSDLYTFGQGTKLEIK

SEQ ID NO: 3153 - protein, 107 aa, Artificial sequence
  VL
DIQLTQSPSFLSASVGDRVTITCRASQGISSYLAWYQQKPGKAPKLLIYAASTLQSGVPSRFSGSGSGTEFTLTISSLQPEDFATYYCQQLNSDLYTFGQGTKLEIK

SEQ ID NO: 3154 - protein, 106 aa, Artificial sequence
  VL
AIQLTQSPSSLSASVGDRVTITCRASQGISSYLAWYQQKPGKAPKLLIFAASTLQSGVPSRFSGSGSGTDFTLTISSLQPEDFATYYCQQLDSYPLFGGGTKVEIK

SEQ ID NO: 3155 - protein, 108 aa, Artificial sequence
  VL
AIQLTQSPSSLSASVGDRVTITCRASQGISSYLAWYQQKPGKAPKLLIYAASTLQSGVPSRFSGSGSGTDFTLTISSLQPEDFATYYCQQLNSYLAITFGQGTRLEIK

SEQ ID NO: 3156 - protein, 108 aa, Artificial sequence
  VL
DIQLTQSPSFLSASVGDRVTITCRASQGISSYLAWYQQKPGKAPKLLIYAASTLQSGVPSRFSGSGSGTEFTLTISSLQPEDFATYYCQQLNSYPPFTFGPGTKVDIK

SEQ ID NO: 3157 - protein, 107 aa, Artificial sequence
  VL
DIQLTQSPSFLSASVGDRVTITCRASQGISSYLAWYQQKPGKAPNLLIYAASTLQSGVPSRFSGSGSGTEFTLTISSLQPEDFATYYCQQLNSYPPAFGPGTKVDIK

SEQ ID NO: 3158 - protein, 108 aa, Artificial sequence
  VL
DIQLTQSPSFLSASVGDRVTITCRASQGISSYLAWYQQKPGKAPKLLIYAASTLQSGVPSRFSGSGSGTEFTLTISSLQPEDFATYYCQQLNTYPPFGFGPGTKVDIK

SEQ ID NO: 3159 - protein, 109 aa, Artificial sequence
  VL
DIQLTQSPSSLSASVGDRVTITCRASQGISSYLAWYQQKPGKAPKLLIYAASTLQSGVPSRFSGSGSGTDFTLTISSLQPEDFATYYCQQLNSYPPMYTFGQGTKLEIK

SEQ ID NO: 3160 - protein, 107 aa, Artificial sequence
  VL
DIQMTQSPSSLSASVGDRVTITCQASQDVSKYLNWYQQKPGKAPKLLIHDASNLQTGVPSRFSGGGSGTDFTFTISSLQPEDIATYYCQQYDNLPVTFGGGTKVEIK

SEQ ID NO: 3161 - protein, 107 aa, Artificial sequence
  VL
DIQMTQSPSSLSASVGDRVTITCQASQDIRNYLNWYQQKPGKAPKLLIHDASNLETGVPSRFIGSGSGTDFTFTISSLQPEDIATYYCQQYDNLPITFGQGTRLEIK

SEQ ID NO: 3162 - protein, 107 aa, Artificial sequence
  VL
DIQMTQSPSSLSASVGDRVTITCQASQDINNYLNWYQQKPGKAPKLLIYDASNLETGVPSRFSGSGSGTDFTFTISSLQPEDIATYYCQQYDNLPPVFGPGTKVDIK

SEQ ID NO: 3163 - protein, 108 aa, Artificial sequence
  VL
DIQMTQSPSSLSASVGDRVTITCQASQDISNYLNWYQQKPGKAPKLLIYDASNLETGVPSRFSGSGSGTDFTFTISSLQPEDIATYYCQQYDNLPLFTFGPGTKVDIK

SEQ ID NO: 3164 - protein, 107 aa, Artificial sequence
  VL
DIQMTQSPSSLSASVGDRVTITCQASQDIRNYLNWYQQKPGKAPNLLIYDASNLETGVPSRFSGSGSGTDFTFTINSLQPEDIATYYCQQYDNLPITFGQGTRLEIK

SEQ ID NO: 3165 - protein, 107 aa, Artificial sequence
  VL
DIQMTQSPSSLSASVGDRVTITCQASQDINKYLNWYQLKPGKAPNLLIYDASNLETGVPSRFSGSGSGTDFTFTISSLQPEDIATYYCHQYDNLPRTFGQGTKVEIK

SEQ ID NO: 3166 - protein, 107 aa, Artificial sequence
  VL
DIQMTQSPSSLSASLGDRVTITCQASQDIRNYLNWYQQKPGKAPKLLIYDASNLETGVPSRFSGSGSGTDFTFTISSLQPEDIATYYCQQYDNLPVTFGGGTKVEIK

SEQ ID NO: 3167 - protein, 108 aa, Artificial sequence
  VL
DIQMTQSPSSLSASVGDRVTITCQASQDISNYLNWYQQKPGKAPKLLIYDASTLETGVPSRFSGSGSGTDFTFTISSLQPEDIATYYCQQHDNLPSFTFGPGTKVDIK

SEQ ID NO: 3168 - protein, 107 aa, Artificial sequence
  VL
DIQMTQSPSSLSASVGDRVTITCQASQDISNYLNWYQQKPGKAPKLLIYDASNLETGVPSRFSGSGSGTDFTFTISSLQPEDIATYYCQQYDNLPPAFGGGTKVEIK

SEQ ID NO: 3169 - protein, 107 aa, Artificial sequence
  VL
DIQMTQSPSSLSASVGDRVTITCQASQDIRSYLNWYQQKPGKAPKLLIYDASNLETGVASRFSGSGSGTDFTFTISSLQPEDIATYYCQQYDNLPQTFGQGTKLEIK

SEQ ID NO: 3170 - protein, 107 aa, Artificial sequence; identical to SEQ ID NO: 1433
  VL

SEQ ID NO: 3171 - protein, 110 aa, Artificial sequence
  VL
QSALTQPASVSGSPGQSITISCTGTSSDVGSYNLVSWYQQRPGKAPKLILYEVTKRPSGVSNRFSGSKSGNTASLAISGLQAEDEADYYCCSYAGSSTWVFGGGTKLTVL

SEQ ID NO: 3172 - protein, 110 aa, Artificial sequence
  VL
QSALTQPASVSGSPGQSITISCTGTSSDVGSYNLVSWYQQHPGKAPKLMIYEGSKRPSGVSNRFSGSKSGNTASLTISGLQAEDEADYYCCSYAGSSTWVFGGGTKLTVL

SEQ ID NO: 3173 - protein, 106 aa, Artificial sequence
  VL
EIVMTQFPATLSVSPGERATLFCRASQSVGSNLAWYQQKPGQAPRLLIYGAFTRATGVPARFSGSGSGSEFSLTISSLQSEDFAVYYCQQYNNWYTFGQGTKLEIK

SEQ ID NO: 3174 - protein, 108 aa, Artificial sequence
  VL
EIVMTQSPATLSVSPGERATLSCRASQSVRTNLAWYQQKRGQAPRLLIYEASTRATGVPDRFSGSGSGTEFTLTISSLQSEDFAVYYCQQYNNWPPITFGQGTRLDIK

SEQ ID NO: 3175 - protein, 108 aa, Artificial sequence
  VL
DIQMTQSPSSLSASVGDRVTITCRASQSISSYLNWYQQKPGKAPKLLIYAASSLQSGVPSRFSASGSGTDFTLTISSLQPEDFATYYCQQSYSMPPVTFGQGTKVEIK

SEQ ID NO: 3176 - protein, 108 aa, Artificial sequence
  VL
EIVLTQSPGTLSLSPGERATLSCRASQSVSSSYLAWYQQKPGQAPRLLIYGASSRATGIPERFSGSGSGTDFTLTISRLEPEDFAVYYCQQYGSTPRTFGQGTKVEIK

SEQ ID NO: 3177 - protein, 107 aa, Artificial sequence
  VL
EIVLTQSPGTLSLSPGERATLSCRASQGVSSFLAWYQQKPGQAPRLLIHGASSRATGIPDRFSGSGSGTDFTLTITRLEPEDFAVYYCQQYGSSPRTFGQGTKVEIK

SEQ ID NO: 3178 - protein, 108 aa, Artificial sequence
  VL
EIVLTQSPGTLSLSPGERATLSCRASQSVSSSYLAWYQQKPGQAPRLLIYGTSSRATGIPDRFSGSGSGTDFTLTISRLEPEDFAVYYCQQYGSSPRTFGQGTKVEIK

SEQ ID NO: 3179 - protein, 103 aa, Artificial sequence
  VL
DIQLTQSPSSLSASVGDRVTITCRASQGISSYLAWYQQKPGKAPKLLIYAASTLQSGVPSRFSGSGSGTDFTLTISSLQPEDFATYYCQQLNSFGPGTKVDIK

SEQ ID NO: 3180 - protein, 108 aa, Artificial sequence
  VL
EIVLTQSPGTLSLSPGERATLSCRASQSVSSSYLAWYQQKPGQAPRLLIYGASSRATGIPDRFSGSGSGTDFTLTISRLEPEDFAMYYCQQYDSSPRTFGQGTKVEIK
